(19) United States
(12) Patent Application Publication
(10) Pub. No.: US 2022/0380457 A1
(43) Pub. Date: Dec. 1, 2022

(54) IGG ANTIBODY COMPOSITIONS AND METHODS OF MAKING THE SAME

(71) Applicant: City of Hope, Duarte, CA (US)

(72) Inventors: Michael A. CALIGIURI, Pasadena, CA (US); Hongsheng DAI, Monrovia, CA (US); Tongwen ZHANG, Monrovia, CA (US)

(21) Appl. No.: 17/637,433

(22) PCT Filed: Aug. 24, 2020
(86) PCT No.: PCT/US20/47675

§ 371 Date: Feb. 22, 2022

Related U.S. Application Data
(60) Provisional application No. 62/891,200, filed on Aug. 23, 2019.

(51) Int. Cl. C07K 16/28; A61P 35/00

(52) U.S. Cl. CPC C07K 16/2803; A61P 35/00; C07K 2317/53; C07K 2317/72; C07K 2317/94; C07K 2319/03

(57) ABSTRACT

Provided herein are antibodies, recombinant proteins, and methods of use thereof including, for example, immunoglobulin G (IgG) antibodies and recombinant proteins including a Fab region and an Fc region connected through a hinge region, where the hinge region is resistant to cleavage by a protease. Also, provided herein, inter alia, are immunoglobulin G (IgG) antibodies and recombinant proteins including a Fab region and an Fc region connected through a hinge region, and where the Fc region has higher affinity for a ligand compared to a wildtype Fc.

### CROSS-REFERENCED APPLICATIONS

[0001] This application claims priority benefit to priority benefit to U.S. Provisional Application No. 62/891,200 filed Aug. 23, 2019, which is incorporated in its entirety by reference herein.

### STATEMENT AS TO RIGHTS TO INVENTIONS MADE UNDER FEDERALLY SPONSORED RESEARCH AND DEVELOPMENT

[0002] This invention was made with government support under grant no. P01CA163205 awarded by the National Institutes of Health. The government has certain rights in the invention.

### SEQUENCE LISTING

[0003] This application includes a Sequence Listing created on Aug. 21, 2020 and submitted electronically as an ASCII file named 048440-730001WO_SL.ST25.txt that is 848 kilobytes and is incorporated herein in its entirety.

### BACKGROUND

[0004] Antibody dependent cellular cytotoxicity (ADCC) represents the main mechanism by which immune cells recognize and clear pathogens or tumor cells following the development of adaptive immunity or therapeutic monoclonal antibody (mAb) infusion. Natural killer (NK) cells are the main effector of ADCC and express the low affinity Fcγ receptor FcγRIIIA/CD16α (CD16α hereafter). However, the concentration of endogenous IgG in human blood is 30-10 μM, which is approximately 100-fold higher than the disassociation constant (Kd) for the CD16α-IgG interaction. Indeed, here we provide evidence demonstrating that human NK cells are naturally coated with endogenous IgG, whose excess competitively inhibits therapeutic mAbs such as Rituxan from binding CD16α and inducing ADCC.

[0005] IdeS is an endopeptidase enzyme derived from Streptococcus pyogenes, and it specifically cleaves at Gly249 in the lower hinge region of the IgG heavy chains, a region essential for CD16α binding. IdeS cleavage of IgG leads to the elimination of FcγRs binding of IgG and consequently, it is released from the NK cell surface freeing up FcγR's binding sites. IdeS has been safely infused into patients in past clinical trials and the cleavage of IgG has been demonstrated in those patients (Jordan et al.). There remains a need for improved cancer therapeutic antibodies.

[0006] Provided herein are, inter alia, solutions to these and other problems in the art.

### BRIEF SUMMARY

[0007] Described herein is a strategy to enhance the efficacy of therapeutic mAb involving (1) making mAbs resistant to IdeS, and (2) removing endogenous IgG binding to FcγR using IdeS. In vitro data described herein demonstrated that this additional availability of FcγR binding sites on CD16α+NK cells, monocytes and macrophages (CD16α and CD32α) and granulocytes (CD64) results in abundantly more binding of the therapeutic mAb and therefore improved efficacy of the therapeutic mAb against the tumor cell target or other relevant target via ADCC.

[0008] In an aspect, provided herein are immunoglobulin G (IgG) antibodies including a Fab region and an Fc region connected through a hinge region, where the hinge region is resistant to cleavage by a protease.

[0009] In an aspect, provided herein are immunoglobulin G (IgG) antibodies including a Fab region and an Fc region connected through a hinge region, and where the Fc region has a dissociation constant of about 1×10⁻⁵ M to about 1×10⁻¹³ M to one or more of CD32 (FcγRII), CD16 (FcγRIII), and CD64 (FcγRI).

[0010] In an aspect, provided herein are recombinant proteins including a Type I transmembrane domain and an immunoglobulin G (IgG) antibody, where the transmembrane domain is fused to the C-terminus of the IgG antibody and the recombinant protein is resistant to cleavage by a protease.

[0011] In an aspect, provided herein are recombinant proteins including a Type I transmembrane domain and an immunoglobulin G (IgG) antibody, where the transmembrane domain is fused to the C-terminus of the IgG antibody and the recombinant protein includes an Fc region with a dissociation constant of about 1×10⁻⁵ M to about 1×10⁻¹³ M to one or more of CD32 (FcγRII), CD16 (FcγRIII), and CD64 (FcγRI).

[0012] In an aspect, provided herein are isolated nucleic acids encoding a recombinant protein described herein.

[0013] In an aspect, provided herein are expression vectors including an isolated nucleic acid encoding a recombinant protein described herein.

[0014] In an aspect, provided herein are cells including an expression vector described herein.

[0015] In an aspect, provided herein are anti-CD20 antibodies including antibodies with CDR variants as set forth in FIG. 14.

[0016] In an aspect, provided herein are methods of binding a ligand to a CHO cell surface recombinant protein including contacting a ligand with a CHO cell surface recombinant protein, where the CHO cell surface recombinant protein includes an epidermal growth factor receptor (EGFR) transmembrane domain and an immunoglobulin G (IgG) antibody. The EGFR-transmembrane domain is fused to the C-terminus of the IgG antibody, the IgG antibody is capable of binding a ligand, and the CHO cell surface protein is resistant to cleavage by an IgG-specific protease or has higher binding affinity for one or more of CD32 (FcγRII), CD16 (FcγRIII), and CD64 (FcγRI).

[0017] In an aspect, provided herein are methods of treating cancer in a patient including administering a therapeutic IgG antibody and an IgG specific protease, where the therapeutic IgG antibody is resistant to the IgG specific protease.

### BRIEF DESCRIPTION OF THE DRAWINGS

[0018] FIG. 1 schematically illustrates that human immune cells are naturally coated with endogenous IgG, which prevents interactions between a therapeutic mAb and FcγRs expressed on the surface of the human immune cells. This thereby limits the binding of therapeutic mAb to FcγRs thus limits the efficacy of the therapeutic mAb.

[0019] FIG. 2 provides flow cytometric data demonstrating that human NK cells are naturally coated with IgG molecules, which can be removed by incubation with the IdeS enzyme. Human peripheral blood mononuclear cells (PBMCs) were digested with IdeS for 30 minutes at 37° C. and stained with antibodies against linage markers or against human IgG Fc. Note CD3+ T cells do not express FcγRs and therefore do not bind human IgG under any condition.

[0020] FIG. 3 schematically illustrates the strategy for enhancing therapeutic efficiency of mAbs. Panel (a) shows FcγRs on immune cells are normally occupied by endogenous IgG; Panel (b) and (c) show IdeS digestion can remove endogenous IgG and free-up FcγR binding sites for infused therapeutic mAb, which are engineered to be resistant to IdeS and retain FcγR binding function; (Panels (c) and (d)); Infused therapeutic mAb may first bind onto unoccupied FcγR as shown in Panel (c) or may first bind tumor-associated antigen expressed on the cancer cell as shown in Panel (d). Regardless, once the antigen-mAb-FcγR crosslink, the FcγR+ cell undergoes immune activation as shown in Panel (f). The flow chart illustrates that the more FcγRs that are unoccupied and therefore available for binding the therapeutic mAb, the more tumor cells are eliminated (Panel (e)).

[0021] FIGS. 4A-4E illustrate flow cytometry density plots of display of various functional IgG proteins on GFP+ Chinese hamster ovary (CHO) cells in the absence or presence of IgG specific protease (IdeS or IdeZ peptidase). The gray dots represent CHO cells treated with control, and black dots represent CHO cells treated with IdeS or IdeZ peptidase, the IgG specific proteases that cleave the IgG hinge region preventing the IgG molecule from binding to Fc-gamma receptors. FIG. 4A quantifies the ability of an mAb recognizing the Fab portion of IgG to bind to IgG1Fc-EGFR, which does not have a Fab portion (top) or rituximab-EGFR (bottom). FIG. 4B quantifies the ability of an mAb recognizing the Fc portion of IgG to bind to IgG1Fc-EGFR (top) or rituximab-EGFR (bottom); Importantly, this particular multi-clonal mAb recognizes regions that are not cleaved by IdeS or IdeZ, thus no cleavage is observed. FIG. 4C quantifies the ability of soluble CD64 (FcγRI) to bind to IgG1Fc-EGFR (top) or rituximab-EGFR (bottom); FIG. 4D quantifies the ability of soluble CD32a (FcγRIIa) to bind to IgG1Fc-EGFR (top) or rituximab-EGFR (bottom); FIG. 4E quantifies the ability of soluble CD16a (FcγRIIIa) to bind to IgG1Fc-EGFR (top) or rituximab-EGFR (bottom).

[0022] FIGS. 5 illustrates the generation of new lower hinge for IgG1Fc with enhanced binding affinity to CD16α and resistance to cleavage by IdeS and IdeZ. Amino acids (AAs) were added in a stepwise fashion to the N-terminus of IgG1 Δ16 (SEQ ID NO: 16), which does not bind CD16α. Clones acquiring CD16α binding were selected for by sequentially attaching more amino acids step by step to increase binding affinity.

[0023] FIGS. 6A-B illustrate the stepwise acquisition of CD16α binding by sequentially adding amino acids (AAs) to IgG1FcΔ16 at its N-terminus. FIG. 6A show binding affinity of various contracts of human IgG1FcΔ16 was fused with EGFR transmembrane helix domain and displayed as a type 1 membrane protein on the CHO cell surface. FIG. 6B shows individual panels of all the positive clones as more AAs were added.

[0024] FIG. 7 shows data collected from CHO cells transfected with rituximab-EGFR. The hinge region of the rituximab is composed of either the wild type (WT) hinge (ELLGGPS; SEQ ID NO: 544), or one of two de novo IdeS/IdeZ-resistant hinges: EETCWDW, which has higher affinity for FcγR CD16α than the WT or EDSCWDW, which has lower affinity for FcγR CD16α than the WT.

[0025] FIG. 8 shows binding affinity of various FcγRs to CHO cells expressing rituximab whose hinge moiety is either WT (ELLGGPS; SEQ ID NO: 544) or has been engineered with novel de novo hinge regions variants (EETCWDW, SEQ ID NO: 545; or EDSCWDW. SEQ ID NO: 546) using the methodology described herein and shown in FIG. 7. The resulting surface IgG expression and binding affinities of various FcγRs were quantified using fluorescent labeled FcγRs ectodomain as indicated on the Y axis, and fluorescent labeled anti-human Fc antibody on the X axis. The FcγRs binding affinity to each hinge moiety is indicated in the upper left quadrant of each histogram.

[0026] FIG. 9 provides a representative example illustrating the resistance of the novel hinge region (EETCWDW) to cleavage by IdeS/IdeZ. The WT rituximab pre-incubated with IdeZ can no longer be detected on the surface of the CD20(+) Daudi lymphoma cells when stained with fluorescently-labelled anti human Fc antibody (left histogram, dashed line), while the EETCWDW rituximab can still be detected (right histogram, dashed line).

[0027] FIG. 10 shows CHO cells transfected with trastuzumab-EGFR. The trastuzumab contains either its wild type (WT) hinge moiety or one of two de novo novel hinge moieties EETCWDW or EDSCWDW that were engineered to replace of the WT hinge region of trastuzumab using the same methodology described herein for rituximab. The resulting surface IgG expression and binding affinities of various FcγRs were quantified using fluorescent labeled FcγRs ectodomain as indicated on the Y axis, and fluorescent labeled anti-human Fc antibody on the X axis. The FcγRs binding affinity to each hinge moiety is indicated in the upper left quadrant of each histogram.

[0028] FIGS. 11A-C demonstrate activity of a rituximab variant. FIGS. 11A-B show representative data comparing WT rituximab and “EETCWDW ritmixmab” in natural killer (NK) cell activation, and FIG. 11C shows representative data comparing WT rituximab and “EETCWDW rituximab” in NK cell depletion of B cells. These experiments were conducted in vitro in whole human blood over the course of 10 hours, without (“control”) or with IdeZ (“IdeZ”). IdeZ removes endogenous IgG binding to FcγRs such as CD16α on innate immune cells such as NK cells, monocytes and granulocytes.

[0029] FIG. 12 demonstrates how increasing concentrations of AB serum (and therefore increasing the concentration of endogenous IgG) in blood out competes EETCWDW rituximab for binding to NK cell FcγRIIIA (CD16α), thereby diminishing NK cell activation.

[0030] FIG. 13 is data demonstrating rituximab expressed on the surface of CHO cells as rituximab-EGFR fusion protein. The X axis shows a fluorescently labeled anti-Fc mAb that can bind to CHO cells expressing IgG1-EGFR or rituximab-EGFR. The Y axis shows a fluorescently labeled CD20 molecule that can bind to rituximab-EGFR. In the left histogram, the CHO cells express IgG1 Fc-EGFR, thus binding on the X axis but no binding on the Y axis. The middle histogram expresses rituximab-EGFR and quantifies the affinity rituximab has for CD20. The histogram to the right shows the binding of the fluorescently labeled CD20 molecule to rituximab (Line A), or to a hypothetical variant of rituximab with higher affinity for CD20 compared to the actual rituximab (Line B), or to a hypothetical variant of rituximab with lower affinity for CD20 compared to the actual rituximab (Line C). Right panels show the expression of the CH2-CH3 fragment of Fc on the surface of CHO cells, so no binding by the human fluorescently labeled CD20 molecule.

[0031] FIG. 14 illustrates flow cytometry density plots of sequence-dependent rituximab target selection and corresponding sequences. The representative example shows multiple clones from the rituximab library consisting of CD20 binding variants and flow cytometric measurement of binding affinity for each variant to a fluorescently labeled CD20 molecule, as demonstrated in FIG. 13.

[0032] FIG. 15 illustrates the progressive acquisition of IdeS resistance by single amino acid substitution.

[0033] FIG. 16 illustrates the binding of wild-type, L248E, and L248D hinge mutant rituximab to human FcγRs. Wild-type or the single amino acid mutants of rituximab (L248E and L248E) were expressed on CHO cells as type I membrane proteins and tested for their expression and binding to human FcγRs using fluorescent labeled anti-human Fc and different human FcγR ectodomains.

### DETAILED DESCRIPTION

### I. Definitions

[0034] Unless defined otherwise, all technical and scientific terms used herein have the same meaning as commonly understood by someone of ordinary skill in the art to which this technology belongs. In this specification and in the claims that follow, reference will be made to a number of terms that shall be defined to have the following meanings:

[0035] As used herein, the term “antibody” is used in accordance with its plain ordinary meanings and refers to a polypeptide encoded by an immunoglobulin gene or functional fragments thereof that specifically binds and recognizes an antigen. The recognized immunoglobulin genes include the kappa, lambda, alpha, gamma, delta, epsilon, and mu constant region genes, as well as the myriad immunoglobulin variable region genes. Light chains are classified as either kappa or lambda. Heavy chains are classified as gamma, mu, alpha, delta, or epsilon, which in turn define the immunoglobulin classes, IgG, IgM, IgA, IgD and IgE, respectively. The term “antibody” also includes bivalent or bispecific molecules, diabodies, triabodies, and tetrabodies.

[0036] As used herein, the terms “specifically (or selectively) binds” or “specifically (or selectively) immunoreactive with,” when referring to a protein or peptide, are used in accordance with their plain ordinary meanings and refer to a binding reaction that is determinative of the presence of the protein, often in a heterogeneous population of proteins and other biologics. Thus, under designated immunoassay conditions, the specified antibodies bind to a particular protein at least two times the background and more typically more than 10 to 100 times background. Specific binding to an antibody under such conditions requires an antibody that is selected for its specificity for a particular protein. For example, polyclonal antibodies can be selected to obtain only a subset of antibodies that are specifically immunoreactive with the selected antigen and not with other proteins. This selection may be achieved by subtracting out antibodies that cross-react with other molecules. A variety of immunoassay formats may be used to select antibodies specifically immunoreactive with a particular protein. For example, solid-phase ELISA immunoassays are routinely used to select antibodies specifically immunoreactive with a protein (see, e.g., Harlow & Lane, Using Antibodies, A Laboratory Manual (1998) for a description of immunoassay formats and conditions that can be used to determine specific immunoreactivity).

[0037] An example of an immunoglobulin (antibody) structural unit comprises a tetramer. Each tetramer is composed of two identical pairs of polypeptide chains, each pair having one “light” (about 25 kDa) and one “heavy” chain (about 50-70 kDa). The N-terminus of each chain defines a variable region of about 100 to 110 or more amino acids primarily responsible for antigen recognition. The terms “variable heavy chain,” “V_{H},” or “VH” refer to the variable region of an immunoglobulin heavy chain, including an Fv, scFv, dsFv or Fab; while the terms “variable light chain,” “V_{L}” or “VL” refer to the variable region of an immunoglobulin light chain, including of an Fv, scFv , dsFv or Fab.

[0038] Examples of antibody functional fragments include, but are not limited to, complete antibody molecules, antibody fragments, such as Fv, single chain Fv (scFv), complementarity determining regions (CDRs), V_{L} (light chain variable region), V_{H} (heavy chain variable region), Fab, F(ab)2′ and any combination of those or any other functional portion of an immunoglobulin peptide capable of binding to target antigen (see, e.g., FUNDAMENTAL IMMUNOLOGY (Paul ed., 4th ed. 2001). As appreciated by one of skill in the art, various antibody fragments can be obtained by a variety of methods, for example, digestion of an intact antibody with an enzyme, such as pepsin; or de novo synthesis. Antibody fragments are often synthesized de novo either chemically or by using recombinant DNA methodology. Thus, the term antibody, as used herein, includes antibody fragments either produced by the modification of whole antibodies, or those synthesized de novo using recombinant DNA methodologies (e.g., single chain Fv) or those identified using phage display libraries.

[0039] As used herein, the term “chimeric antibody” is used in accordance with its plain ordinary meaning and refers to an antibody molecule in which (a) the constant region, or a portion thereof, is altered, replaced or exchanged so that the antigen binding site (variable region) is linked to a constant region of a different or altered class, effector function and/or species, or an entirely different molecule which confers new properties to the chimeric antibody, e.g., an enzyme, toxin, hormone, growth factor, drug, etc.; or (b) the variable region, or a portion thereof, is altered, replaced or exchanged with a variable region having a different or altered antigen specificity. The preferred antibodies of, and for use according to the invention include humanized and/or chimeric monoclonal antibodies.

[0040] As used herein, the term “therapeutic antibody” is used in accordance with its plain ordinary meaning and refers to an antibody useful in treating a disease. A therapeutic antibody can activate, repress, or alter endogenous immune responses to specific cells or molecules. In embodiments, a therapeutic antibody is an antibody useful in treating cancer, inflammatory, and/or autoimmune disease. In embodiments, a therapeutic antibody is an antibody useful in treating cancer. In embodiments, the therapeutic antibody is an IgG antibody and such embodiments may be referred to as a therapeutic IgG or therapeutic IgG antibody. Examples of a therapeutic antibody include Abciximab, Adalimumab, Alemtuzumab, Alemtuzumab, Alirocumab, Arcitumomab, Atezolizumab, Avelumab, Basiliximab, Belimumab, Besilesomab, Bevacizumab, Bezlotoxumab, Brentuximab, Brodalumab, Canakinumab, Capromab, Catumaxomab, Certolizumab pegol, Cetuximab, Daratumumab, Denosumab, Dinutuximab, Dupilumab, Durvalumab, Eculizumab, Efalizumab, Elotuzumab, Fanolesomab, Gemtuzumab ozogamicin, Golimumab, Ibritumomab tiuxetan, Idarucizumab, Imiciromab, Infliximab, Ipilimumab, Mepolizumab, Muromonab-CD3, Natalizumab, Necitumumab, Nivolumab, Nofetumomab, Obiltoxaximab, Obinutuzumab, Ocrelizumab, Ofatumumab, Olaratumab, Omalizumab, Palivizumab, Panitumumab, Pembrolizumab, Pertuzumab, Ramucirumab, Ranibizumab, Raxibacumab, Reslizumab, Rituximab, Satumomab, Secukinumab, Siltuximab, Sulesomab, Tocilizumab, Tositumomab, Trastuzumab, Trastuzumab emtansine, Ustekinumab, Vedolizumab, Volocumab, and Votumumab.

[0041] As used herein, the term “Rituximab” is used in accordance with its plain ordinary meaning and refers to a monoclonal antibody therapeutic invented by Genentech, Inc. that targets the CD20 antigen expressed on the surface of B-cells. It is also known by the brand names Rituxan (Genentech, Inc.), Rituxan Sc (Hoffman-La Roche, Inc.), and biosimilar Truixma (Celltiron, Cephalon, Inc.). The hinge region is denoted by Kabat numbering as positions 246-252 and alternatively as positions 233-239 by numbering used, for example, in U.S. Pat. No. 7,317,091.

[0042] As used herein, the term “cancer” is used in accordance with its plain ordinary meaning and refers to all types of cancer, neoplasm or malignant tumors found in mammals (e.g. humans), including leukemias, lymphomas, carcinomas and sarcomas. Examples of cancers that may be treated with a compound, composition, or method provided herein include brain cancer, glioma, glioblastoma, neuroblastoma, prostate cancer, colorectal cancer, pancreatic cancer, Medulloblastoma, melanoma, cervical cancer, gastric cancer, ovarian cancer, lung cancer, cancer of the head, Hodgkin's Disease, and Non-Hodgkin's Lymphomas. Additional examples include, thyroid carcinoma, cholangiocarcinoma, pancreatic adenocarcinoma, skin cutaneous melanoma, colon adenocarcinoma, rectum adenocarcinoma, stomach adenocarcinoma, esophageal carcinoma, head and neck squamous cell carcinoma, breast invasive carcinoma, lung adenocarcinoma, lung squamous cell carcinoma, non-small cell lung carcinoma, mesothelioma, multiple myeloma, neuroblastoma, glioma, glioblastoma multiforme, ovarian cancer, rhabdomyosarcoma, primary thrombocytosis, primary macroglobulinemia, primary brain tumors, malignant pancreatic insulanoma, malignant carcinoid, urinary bladder cancer, premalignant skin lesions, testicular cancer, thyroid cancer, neuroblastoma, esophageal cancer, genitourinary tract cancer, malignant hypercalcemia, endometrial cancer, adrenal cortical cancer, neoplasms of the endocrine or exocrine pancreas, medullary thyroid cancer, medullary thyroid carcinoma, melanoma, colorectal cancer, papillary thyroid cancer, hepatocellular carcinoma, or prostate cancer.

[0043] The term “leukemia” is used in accordance with its plain ordinary meaning and refers broadly to progressive, malignant diseases of the blood-forming organs and is generally characterized by a distorted proliferation and development of leukocytes and their precursors in the blood and bone marrow. Leukemia is generally clinically classified on the basis of (1) the duration and character of the disease-acute or chronic; (2) the type of cell involved; myeloid (myelogenous), lymphoid (lymphogenous), or monocytic; and (3) the increase or non-increase in the number abnormal cells in the blood-leukemic or aleukemic (subleukemic). Examples of leukemias that may be treated with a compound or method provided herein include, for example, acute nonlymphocytic leukemia, chronic lymphocytic leukemia, acute granulocytic leukemia, chronic granulocytic leukemia, acute promyelocytic leukemia, adult T-cell leukemia, aleukemic leukemia, a leukocythemic leukemia, basophylic leukemia, blast cell leukemia, bovine leukemia, chronic myelocytic leukemia, leukemia cutis, embryonal leukemia, eosinophilic leukemia, Gross' leukemia, hairy-cell leukemia, hemoblastic leukemia, hemocytoblastic leukemia, histiocytic leukemia, stem cell leukemia, acute monocytic leukemia, leukopenic leukemia, lymphatic leukemia, lymphoblastic leukemia, lymphocytic leukemia, lymphogenous leukemia, lymphoid leukemia, lymphosarcoma cell leukemia, mast cell leukemia, megakaryocytic leukemia, micromyeloblastic leukemia, monocytic leukemia, myeloblastic leukemia, myelocytic leukemia, myeloid granulocytic leukemia, myelomonocytic leukemia, Naegeli leukemia, plasma cell leukemia, multiple myeloma, plasmacytic leukemia, promyelocytic leukemia, Rieder cell leukemia, Schilling's leukemia, stem cell leukemia, subleukemic leukemia, or undifferentiated cell leukemia.

[0044] The term “patient” or “subject in need thereof” is used in accordance with its plain ordinary meaning and refers to a living organism suffering from or prone to a disease or condition that can be treated by administration of a composition, compound, or method as provided herein. Non-limiting examples include humans, other mammals, bovines, rats, mice, dogs, monkeys, goat, sheep, cows, deer, and other non-mammalian animals. In some embodiments, a patient is human. In embodiments, the subject has, had, or is suspected of having cancer.

[0045] As used herein, the terms “control” or “control experiment” are used in accordance with its plain ordinary meaning and refer to an experiment in which the subjects or reagents of the experiment are treated as in a parallel experiment except for omission of a procedure, reagent, or variable of the experiment. In some instances, the control is used as a standard of comparison in evaluating experimental effects. In some embodiments, a control is the measurement of the activity of a protein in the absence of a compound as described herein (including embodiments and examples).

[0046] As used herein, the terms “treating” or “treatment” are used in accordance with its plain ordinary meaning and refer to any indicia of success in the therapy or amelioration of an injury, disease, pathology or condition, including any objective or subjective parameter such as abatement; remission; diminishing of symptoms or making the injury, pathology or condition more tolerable to the patient; slowing in the rate of degeneration or decline; making the final point of degeneration less debilitating; improving a patient's physical or mental well-being. The treatment or amelioration of symptoms can be based on objective or subjective parameters; including the results of a physical examination, neuropsychiatric exams, and/or a psychiatric evaluation. The term “treating” and conjugations thereof, may include prevention of an injury, pathology, condition, or disease. In embodiments, treating includes preventing. In embodiments, treating does not include preventing.

[0047] As used herein, the term “percentage of sequence identity” is used in accordance with its plain ordinary meaning and is determined by comparing two optimally aligned sequences over a comparison window, wherein the portion of the polynucleotide or polypeptide sequence in the comparison window may comprise additions or deletions (i.e., gaps) as compared to the reference sequence (which does not comprise additions or deletions) for optimal alignment of the two sequences. The percentage is calculated by determining the number of positions at which the identical nucleic acid base or amino acid residue occurs in both sequences to yield the number of matched positions, dividing the number of matched positions by the total number of positions in the window of comparison and multiplying the result by 100 to yield the percentage of sequence identity.

[0048] As used herein, the terms “identical” or percent “identity,” are used in accordance with their plain ordinary meanings and in the context of two or more nucleic acids or polypeptide sequences, refer to two or more sequences or subsequences that are the same or have a specified percentage of amino acid residues or nucleotides that are the same (i.e., about 60% identity, preferably 65%, 70%, 75%, 80%, 85%, 90%, 91%, 92%, 93%, 94%, 95%, 96%, 97%, 98%, 99%, or higher identity over a specified region, when compared and aligned for maximum correspondence over a comparison window or designated region) as measured using a BLAST or BLAST 2.0 sequence comparison algorithms with default parameters described below, or by manual alignment and visual inspection (see, e.g., NCBI web site http://www.ncbi.nlm.nih.gov/BLAST/or the like). Such sequences are then said to be “substantially identical.” This definition also refers to, or may be applied to, the compliment of a test sequence. The definition also includes sequences that have deletions and/or additions, as well as those that have substitutions. As described below, the preferred algorithms can account for gaps and the like. Preferably, identity exists over a region that is at least about 25 amino acids or nucleotides in length, or more preferably over a region that is 50-100 amino acids or nucleotides in length.

[0049] As used herein, the terms “affinity selection” or “affinity maturation” are used in accordance with their plain ordinary meanings and refer to a process in which an antibody is evolved from a reference antibody, typically by mutation of one or more amino acid residues, to have increased activity for a target antigen than a corresponding form of the reference antibody has for the same target antigen. Hence, the evolved antibody is optimized compared to the reference antibody. Selection of refined antibodies can be achieved through various biophysical and in vitro methods.

[0050] As used herein, the term “fusion protein” is used in accordance with its plain ordinary meaning and refers to a covalently-linked polypeptide chain derived from two or more different proteins or genes of origin.

[0051] As used herein, the terms “CD16 protein” or “CD16” or “FcγRIII” or “Fc gamma receptor III” are used in accordance with their plain ordinary meanings and refer to any of the recombinant or naturally-occurring forms of receptor CD16 or Cluster of Differentiation 16 (CD16), or variants or homologs thereof that maintain CD16 activity (e.g. within at least 50%, 80%, 90%, 95%, 96%, 97%, 98%, 99% or 100% activity compared to CD16). In some aspects, the variants or homologs have at least 90%, 95%, 96%, 97%, 98%, 99% or 100% amino acid sequence identity across the whole sequence or a portion of the sequence (e.g. a 50, 100, 150 or 200 continuous amino acid portion) compared to a naturally occurring CD16 protein. In embodiments, the CD16 protein is substantially identical to the protein identified by the UniProt reference number P08637 or a variant or homolog having substantial identity thereto. In embodiments, the CD16 protein is substantially identical to the protein identified by the UniProt reference number Q9ULV2 or a variant or homolog having substantial identity thereto. CD16 is a receptor for Fc region of IgG, and mediates antibody-dependent cellular cytotoxicity (ADCC).

[0052] As used herein, the terms “CD32 protein” or “CD32” or “FcγRII” or “Fc gamma receptor II” are used in accordance with their plain ordinary meanings and refer to any of the recombinant or naturally-occurring forms of receptor CD32 or Cluster of Differentiation 32 (CD32), or variants or homologs thereof that maintain CD32 activity (e.g. within at least 50%, 80%, 90%, 95%, 96%, 97%, 98%, 99% or 100% activity compared to CD32). In some aspects, the variants or homologs have at least 90%, 95%, 96%, 97%, 98%, 99% or 100% amino acid sequence identity across the whole sequence or a portion of the sequence (e.g. a 50, 100, 150 or 200 continuous amino acid portion) compared to a naturally occurring CD32 protein. In embodiments, the CD32 protein is substantially identical to the protein identified by the UniProt reference number P12318 or a variant or homolog having substantial identity thereto. In embodiments, the CD32 protein is substantially identical to the protein identified by the UniProt reference number P31994 or a variant or homolog having substantial identity thereto. In embodiments, the CD32 protein is substantially identical to the protein identified by the UniProt reference number P31995 or a variant or homolog having substantial identity thereto. CD32 is a receptor for the Fc region of complexed or aggregated IgG, mediates B-cell activation, phagocytosis, and endocytosis of immune complexes.

[0053] As used herein, the terms “CD64 protein” or “CD64” or “FcγRI” or “Fc gamma receptor I” are used in accordance with their plain ordinary meanings and refer to any of the recombinant or naturally-occurring forms of receptor CD64 or Cluster of Differentiation 64 (CD64), or variants or homologs thereof that maintain CD64 activity (e.g. within at least 50%, 80%, 90%, 95%, 96%, 97%, 98%, 99% or 100% activity compared to CD64). In some aspects, the variants or homologs have at least 90%, 95%, 96%, 97%, 98%, 99% or 100% amino acid sequence identity across the whole sequence or a portion of the sequence (e.g. a 50, 100, 150 or 200 continuous amino acid portion) compared to a naturally occurring CD64 protein. In embodiments, the CD64 protein is substantially identical to the protein identified by the UniProt reference number P12314 or a variant or homolog having substantial identity thereto. In embodiments, the CD64 protein is substantially identical to the protein identified by the UniProt reference number Q92637 or a variant or homolog having substantial identity thereto. In embodiments, the CD64 protein is substantially identical to the protein identified by the UniProt reference number P30273 or a variant or homolog having substantial identity thereto. CD64 is a high-affinity receptor that binds non-complexed immunoglobulins.

[0054] As used herein, the terms “EGFR protein” or “EGFR” or “HER1” are used in accordance with their plain ordinary meanings and refer to any of the recombinant or naturally-occurring forms of epidermal growth factor receptor (EGFR) also known as ErbB-1 or HER1 in humans, or variants or homologs thereof that maintain EGFR activity (e.g. within at least 50%, 80%, 90%, 95%, 96%, 97%, 98%, 99% or 100% activity compared to EGFR). In some aspects, the variants or homologs have t least 90%, 95%, 96%, 97%, 98%, 99% or 100% amino acid sequence identity across the whole sequence or a portion of the sequence (e.g. a 50, 100, 150 or 200 continuous amino acid portion) compared to a naturally occurring EGFR protein. In embodiments, the EGFR protein is substantially identical to the protein identified by the UniProt reference number P00533 or a variant or homolog having substantial identity thereto. EGFR is a receptor tyrosine kinase.

[0055] As used herein, the terms “PDGFR protein” or “PDGFR” are used in accordance with their plain ordinary meanings and refer to any of the recombinant or naturally-occurring forms of platelet-derived growth factor receptor (PDGFR) or variants or homologs thereof that maintain PDGFR activity (e.g. within at least 50%, 80%, 90%, 95%, 96%, 97%, 98%, 99% or 100% activity compared to PDGFR). In some aspects, the variants or homologs have at least 90%, 95%, 96%, 97%, 98%, 99% or 100% amino acid sequence identity across the whole sequence or a portion of the sequence (e.g. a 50, 100, 150 or 200 continuous amino acid portion) compared to a naturally occurring EGFR protein. In embodiments, the PDGFR protein is substantially identical to the protein PDGFR-alpha, identified by the UniProt reference number P16234 or a variant or homolog having substantial identity thereto. In embodiments, the PDGFR protein is substantially identical to the protein PDGFR-beta identified by the UniProt reference number P09619 or a variant or homolog having substantial identity thereto. PDGFR is a receptor tyrosine kinase.

[0056] As used herein, the terms “HER-2 protein” or “HER2” or “human epidermal growth factor receptor 2” or “Receptor Tyrosine-Protein Kinase ERBB-2” or “ERBB2” or “proto-oncogene Neu” or “CD340” or “Cluster of Differentiation 340” are used in accordance with their plain ordinary meanings and refer to any of the recombinant or naturally-occurring forms of human epidermal growth factor receptor 2 (HER2) or variants or homologs thereof that maintain HER2 activity (e.g. within at least 50%, 80%, 90%, 95%, 96%, 97%, 98%, 99% or 100% activity compared to HER2). In some aspects, the variants or homologs have at least 90%, 95%, 96%, 97%, 98%, 99% or 100% amino acid sequence identity across the whole sequence or a portion of the sequence (e.g. a 50, 100, 150 or 200 continuous amino acid portion) compared to a naturally occurring HER2 protein. In embodiments, the HER2 protein is substantially identical to the protein identified by the UniProt reference number P04626 or a variant or homolog having substantial identity thereto. HER2 is a receptor tyrosine kinase.

[0057] As used herein, the terms “HER-3 protein” or “HER3” or “human epidermal growth factor receptor 3” or “Receptor Tyrosine-Protein Kinase ERBB-3” or “ERBB3” or “proto-oncogene-like protein c-ErbB-3” are used in accordance with their plain ordinary meanings and refer to any of the recombinant or naturally-occurring forms of human epidermal growth factor receptor 3 (HER3) or variants or homologs thereof that maintain HER3 activity (e.g. within at least 50%, 80%, 90%, 95%, 96%, 97%, 98%, 99% or 100% activity compared to HER3). In some aspects, the variants or homologs have at least 90%, 95%, 96%, 97%, 98%, 99% or 100% amino acid sequence identity across the whole sequence or a portion of the sequence (e.g. a 50, 100, 150 or 200 continuous amino acid portion) compared to a naturally occurring HER3 protein. In embodiments, the HER3 protein is substantially identical to the protein identified by the UniProt reference number P21860 or a variant or homolog having substantial identity thereto. HER3 is a receptor tyrosine kinase.

[0058] As used herein, the terms “HER-4 protein” or “HER4” or “human epidermal growth factor receptor 4” or “Receptor Tyrosine-Protein Kinase ERBB-4” or “ERBB4” or “proto-oncogene-like protein c-ErbB-4” are used in accordance with their plain ordinary meanings and refer to any of the recombinant or naturally-occurring forms of human epidermal growth factor receptor 4 (HER4) or variants or homologs thereof that maintain HER4 activity (e.g. within at least 50%, 80%, 90%, 95%, 96%, 97%, 98%, 99% or 100% activity compared to HER4). In some aspects, the variants or homologs have at least 90%, 95%, 96%, 97%, 98%, 99% or 100% amino acid sequence identity across the whole sequence or a portion of the sequence (e.g. a 50, 100, 150 or 200 continuous amino acid portion) compared to a naturally occurring HER4 protein. In embodiments, the HER4 protein is substantially identical to the protein identified by the UniProt reference number Q15303 or a variant or homolog having substantial identity thereto. HER4 is a receptor tyrosine kinase.

[0059] As used herein, the terms “FGFR-1 protein” or “FGFR1” or “fibroblast growth factor receptor 1” or “basic fibroblast growth factor receptor” or “N-sam” or “proto-oncogene c-Fgr” are used in accordance with their plain ordinary meanings and refer to any of the recombinant or naturally-occurring forms of fibroblast growth factor receptor 1 (FGFR1) or variants or homologs thereof that maintain FGFR1 activity (e.g. within at least 50%, 80%, 90%, 95%, 96%, 97%, 98%, 99% or 100% activity compared to FGFR1). In some aspects, the variants or homologs have at least 90%, 95%, 96%, 97%, 98%, 99% or 100% amino acid sequence identity across the whole sequence or a portion of the sequence (e.g. a 50, 100, 150 or 200 continuous amino acid portion) compared to a naturally occurring FGFR1 protein. In embodiments, the FGFR1 protein is substantially identical to the protein identified by the UniProt reference number P11362 or a variant or homolog having substantial identity thereto. FGFR1 is a receptor tyrosine kinase.

[0060] As used herein, the terms “FGFR-2 protein” or “FGFR2” or “fibroblast growth factor receptor 2” or “keratinocyte growth factor receptor” or “K-sam” are used in accordance with their plain ordinary meanings and refer to any of the recombinant or naturally-occurring forms of fibroblast growth factor receptor 2 (FGFR2) or variants or homologs thereof that maintain FGFR2 activity (e.g. within at least 50%, 80%, 90%, 95%, 96%, 97%, 98%, 99% or 100% activity compared to FGFR2). In some aspects, the variants or homologs have at least 90%, 95%, 96%, 97%, 98%, 99% or 100% amino acid sequence identity across the whole sequence or a portion of the sequence (e.g. a 50, 100, 150 or 200 continuous amino acid portion) compared to a naturally occurring FGFR2 protein. In embodiments, the FGFR2 protein is substantially identical to the protein identified by the UniProt reference number P21802 or a variant or homolog having substantial identity thereto. FGFR2 is a receptor tyrosine kinase.

[0061] As used herein, the terms “FGFR-3 protein” or “FGFR3” or “fibroblast growth factor receptor 3” are used in accordance with their plain ordinary meanings and refer to any of the recombinant or naturally-occurring forms of fibroblast growth factor receptor 3 (FGFR3) or variants or homologs thereof that maintain FGFR3 activity (e.g. within at least 50%, 80%, 90%, 95%, 96%, 97%, 98%, 99% or 100% activity compared to FGFR3). In some aspects, the variants or homologs have at least 90%, 95%, 96%, 97%, 98%, 99% or 100% amino acid sequence identity across the whole sequence or a portion of the sequence (e.g. a 50, 100, 150 or 200 continuous amino acid portion) compared to a naturally occurring FGFR3 protein. In embodiments, the FGFR3 protein is substantially identical to the protein identified by the UniProt reference number P22607 or a variant or homolog having substantial identity thereto. FGFR3 is a receptor tyrosine kinase.

[0062] As used herein, the terms “FGFR-4 protein” or “FGFR4” or “fibroblast growth factor receptor 4” are used in accordance with their plain ordinary meanings and refer to any of the recombinant or naturally-occurring forms of fibroblast growth factor receptor 4 (FGFR4) or variants or homologs thereof that maintain FGFR4 activity (e.g. within at least 50%, 80%, 90%, 95%, 96%, 97%, 98%, 99% or 100% activity compared to FGFR4). In some aspects, the variants or homologs have at least 90%, 95%, 96%, 97%, 98%, 99% or 100% amino acid sequence identity across the whole sequence or a portion of the sequence (e.g. a 50, 100, 150 or 200 continuous amino acid portion) compared to a naturally occurring FGFR4 protein. In embodiments, the FGFR4 protein is substantially identical to the protein identified by the UniProt reference number P22455 or a variant or homolog having substantial identity thereto. FGFR4 is a receptor tyrosine kinase.

[0063] As used herein, the terms “VEGFR-1 protein” or “VEGFR1” or “vascular endothelial growth factor receptor 1” are used in accordance with their plain ordinary meanings and refer to any of the recombinant or naturally-occurring forms of vascular endothelial growth factor receptor 1 (VEGFR1) or variants or homologs thereof that maintain VEGFR1 activity (e.g. within at least 50%, 80%, 90%, 95%, 96%, 97%, 98%, 99% or 100% activity compared to VEGFR1). In some aspects, the variants or homologs have at least 90%, 95%, 96%, 97%, 98%, 99% or 100% amino acid sequence identity across the whole sequence or a portion of the sequence (e.g. a 50, 100, 150 or 200 continuous amino acid portion) compared to a naturally occurring VEGFR1 protein. In embodiments, the VEGFR1 protein is substantially identical to the protein identified by the UniProt reference number P17948 or a variant or homolog having substantial identity thereto. VEGFR1 is a receptor tyrosine kinase.

[0064] As used herein, the terms “VEGFR-2 protein” or “VEGFR2” or “vascular endothelial growth factor receptor 2” are used in accordance with their plain ordinary meanings and refer to any of the recombinant or naturally-occurring forms of vascular endothelial growth factor receptor 1 (VEGFR2) or variants or homologs thereof that maintain VEGFR2 activity (e.g. within at least 50%, 80%, 90%, 95%, 96%, 97%, 98%, 99% or 100% activity compared to VEGFR2). In some aspects, the variants or homologs have at least 90%, 95%, 96%, 97%, 98%, 99% or 100% amino acid sequence identity across the whole sequence or a portion of the sequence (e.g. a 50, 100, 150 or 200 continuous amino acid portion) compared to a naturally occurring VEGFR2 protein. In embodiments, the VEGFR2 protein is substantially identical to the protein identified by the UniProt reference number P35968 or a variant or homolog having substantial identity thereto. VEGFR2 is a receptor tyrosine kinase.

[0065] As used herein, the terms “VEGFR-3 protein” or “VEGFR3” or “vascular endothelial growth factor receptor 3” are used in accordance with their plain ordinary meanings and refer to any of the recombinant or naturally-occurring forms of vascular endothelial growth factor receptor 1 (VEGFR3) or variants or homologs thereof that maintain VEGFR3 activity (e.g. within at least 50%, 80%, 90%, 95%, 96%, 97%, 98%, 99% or 100% activity compared to VEGFR3). In some aspects, the variants or homologs have at least 90%, 95%, 96%, 97%, 98%, 99% or 100% amino acid sequence identity across the whole sequence or a portion of the sequence (e.g. a 50, 100, 150 or 200 continuous amino acid portion) compared to a naturally occurring VEGFR3 protein. In embodiments, the VEGFR3 protein is substantially identical to the protein identified by the UniProt reference number P35916 or a variant or homolog having substantial identity thereto. VEGFR3 is a receptor tyrosine kinase.

[0066] As used herein, the terms “NTRK1 protein” or “NTRK1” or “Trk-A” or “high affinity nerve growth factor receptor” or “neurotrophic tyrosine kinase receptor type 1” or “tropomyosin-related kinase A” are used in accordance with their plain ordinary meanings and refer to any of the recombinant or naturally-occurring forms of high affinity nerve growth factor receptor (NTRK1) or variants or homologs thereof that maintain NTRK1 activity (e.g. within at least 50%, 80%, 90%, 95%, 96%, 97%, 98%, 99% or 100% activity compared to NTRK1). In some aspects, the variants or homologs have at least 90%, 95%, 96%, 97%, 98%, 99% or 100% amino acid sequence identity across the whole sequence or a portion of the sequence (e.g. a 50, 100, 150 or 200 continuous amino acid portion) compared to a naturally occurring NTKR1 protein. In embodiments, the NTKR1 protein is substantially identical to the protein identified by the UniProt reference number P04629 or a variant or homolog having substantial identity thereto. NTKR1 is a receptor tyrosine kinase.

[0067] As used herein, the terms “NTRK2 protein” or “NTRK2” or “Trk-B” or “BDNF/NT-3 growth factors receptor” or “brain derived neurotrophic growth factor receptor” are used in accordance with their plain ordinary meanings and refer to any of the recombinant or naturally-occurring forms of oncogene BDNF/NT-3 growth factors receptor (NTRK2) or variants or homologs thereof that maintain NTRK2 activity (e.g. within at least 50%, 80%, 90%, 95%, 96%, 97%, 98%, 99% or 100% activity compared to NTRK2). In some aspects, the variants or homologs have at least 90%, 95%, 96%, 97%, 98%, 99% or 100% amino acid sequence identity across the whole sequence or a portion of the sequence (e.g. a 50, 100, 150 or 200 continuous amino acid portion) compared to a naturally occurring NTKR2 protein. In embodiments, the NTKR2 protein is substantially identical to the protein identified by the UniProt reference number Q16620 or a variant or homolog having substantial identity thereto. NTKR2 is a receptor tyrosine kinase.

[0068] As used herein, the terms “NTRK3 protein” or “NTRK3” or “Trk-C” or “NT-3 growth factor receptor” are used in accordance with their plain ordinary meanings and refer to any of the recombinant or naturally-occurring forms of NT-3 growth factor receptor (NTRK3) or variants or homologs thereof that maintain NTRK3 activity (e.g. within at least 50%, 80%, 90%, 95%, 96%, 97%, 98%, 99% or 100% activity compared to NTRK3). In some aspects, the variants or homologs have at least 90%, 95%, 96%, 97%, 98%, 99% or 100% amino acid sequence identity across the whole sequence or a portion of the sequence (e.g. a 50, 100, 150 or 200 continuous amino acid portion) compared to a naturally occurring NTKR3 protein. In embodiments, the NTKR3 protein is substantially identical to the protein identified by the UniProt reference number Q16628 or a variant or homolog having substantial identity thereto. NTKR3 is a receptor tyrosine kinase.

[0069] As used herein, the term “IGF1R protein” or “IGF1R” or “insulin-like growth factor receptor” are used in accordance with their plain ordinary meanings and refer to any of the recombinant or naturally-occurring forms of insulin-like growth factor receptor (IGF1R) or variants or homologs thereof that maintain IGF1R activity (e.g. within at least 50%, 80%, 90%, 95%, 96%, 97%, 98%, 99% or 100% activity compared to IGF1R). In some aspects, the variants or homologs have at least 90%, 95%, 96%, 97%, 98%, 99% or 100% amino acid sequence identity across the whole sequence or a portion of the sequence (e.g. a 50, 100, 150 or 200 continuous amino acid portion) compared to a naturally occurring IGF1R protein. In embodiments, the IGF1R protein is substantially identical to the protein identified by the UniProt reference number P08069 or a variant or homolog having substantial identity thereto. IGF1R is a receptor tyrosine kinase.

[0070] As used herein, the terms “glutamyl endopeptidase V8” or “GluV8” or “SspA” or “endopeptidase Glu-C” or “V8 protease” or “staphylococcal serine protease” are used in accordance with their plain and ordinary meanings and refer to any of the recombinant or naturally-occurring forms of the SspA protein or variants or homologs thereof that maintain SspA activity (e.g. within at least 50%, 80%, 90%, 95%, 96%, 97%, 98%, 99% or 100% activity compared to SspA). In some aspects, the variants or homologs have at least 90%, 95%, 96%, 97%, 98%, 99% or 100% amino acid sequence identity across the whole sequence or a portion of the sequence (e.g. a 50, 100, 150 or 200 continuous amino acid portion) compared to a naturally occurring SspA polypeptide. In embodiments, SspA is the protein as identified by the UniProt reference number P0C1U8 or a variant or homolog having substantial identity thereto. SspA is a serine protease that preferentially cleaves peptide bonds on the carboxyl-terminal side of glutamate and aspartate.

[0071] As used herein, the terms “immunoglobulin domain” or “Ig-domain” are used in accordance with their plain and ordinary meanings and refer to any of the recombinant or naturally-occurring forms of the Ig-domain or variants or homologs thereof that maintain the Ig-domain fold or three-dimensional structure. The Ig-domain belongs to a family of protein folds that consist of a 2-layer sandwich of 7-9 antiparallel beta-strands arranged in two beta-sheets with a Greek-key topology. The folding pattern typically consists of (N-terminal beta-hairpin-in sheet 1)-(beta-haripin-in sheet 2)-(beta-strand in sheet 1)-(C-terminal beta-hairpin in sheet 2) linkages. Immunoglobulin domains are the primary components of antibodies, and a large set of extracellular surface receptors, including receptor tyrosine kinases.

[0072] As used herein, the terms “Immunoglobulin G” or “IgG” are used in accordance with their plain and ordinary meanings and refer to any of the recombinant or naturally-occurring forms of the IgG antibody protein or variants or homologs thereof that maintain IgG activity (e.g. within at least 50%, 80%, 90%, 95%, 96%, 97%, 98%, 99% or 100% activity compared to IgG). In some aspects, the variants or homologs have at least 90%, 95%, 96%, 97%, 98%, 99% or 100% amino acid sequence identity across the whole sequence or a portion of the sequence (e.g. a 50, 100, 150 or 200 continuous amino acid portion) compared to a naturally occurring IgG polypeptide. IgG antibodies are composed of four separate chains (two identical light chains and two identical heavy chains) that form a homodimer (via inter-heavy chain disulfide) of heterodimers (one light chain and one heavy chain interchain disulfide) in a canonical Y-shaped quaternary structure. The light chain includes a variable immunoglobulin domain (V_{L}) and a constant immunoglobulin domain (C_{L}). The heavy chain includes one variable immunoglobulin domain (V_{H}) and three constant immunoglobulin domains (C_{H}1, C_{H}2, C_{H}3). The variable domains form the antigen-recognition surface of an IgG antibody. There are four subclasses of IgG, IgG1, IgG2, IgG3, and IgG4 that are different by function. IgG1 mediates thymus-related immune responses against polypeptide and protein antigens. IgG2 mediates immune responses toward polysaccharide or carbohydrate antigens. IgG3 mediates high-affinity responses against proteins and polypeptide antigens. IgG4 has a role in responses associated with food allergies, but its function is largely unknown.

[0073] As used herein, the terms “Fc region” or “fragment crystallizable region” are used in accordance with their plain and ordinary meanings and refer to any of the recombinant or naturally-occurring forms of the tail-end region (C-terminal) of an antibody that interacts with a cell-surface receptors known as Fc-receptors. The Fc region is comprised of two heavy chain constant Ig domains in the antibodies IgG, IgA, and IgD, and of three heavy chain constant Ig domains in the antibodies IgE and IgM.

[0074] As used herein, the terms “Fab region” or “antigen-binding fragment region” are used in accordance with their plain and ordinary meanings and refer to any of the recombinant or naturally-occurring forms of the tail-end region (N-terminal) of an antibody that contains the antigen recognition and binding site. The Fab region is generally comprised of one variable domain and one constant domain from both the light chain and the heavy chain in the antibodies IgG, IgA, IgD, and IgE, and IgM.

[0075] As used herein, the term “hinge region” is used in accordance with its plain and ordinary meaning and refers to any of the recombinant or naturally-occurring forms of the region of an antibody corresponding to the polypeptide sequence that connects the Fab and Fc domains in an antibody, and/or the sequence connecting two single chain variable fragments (scFv) from the light and heavy chains at the N-terminal end of the antibody.

[0076] As used herein, the terms “pepsin” or “pepsinogen A” are used in accordance with their plain and ordinary meanings and refer to any of the recombinant or naturally-occurring forms of the pepsin protein or variants or homologs thereof that maintain pepsin activity (e.g. within at least 50%, 80%, 90%, 95%, 96%, 97%, 98%, 99% or 100% activity compared to pepsin). In some aspects, the variants or homologs have at least 90%, 95%, 96%, 97%, 98%, 99% or 100% amino acid sequence identity across the whole sequence or a portion of the sequence (e.g. a 50, 100, 150 or 200 continuous amino acid portion) compared to a naturally occurring pepsin polypeptide. In embodiments, pepsin is the protein as identified by the NCBI sequence reference GI:387013, homolog or functional fragment thereof.

[0077] As used herein, the terms “Cathepsin G” or “Cathepsin G protease” are used in accordance with their plain and ordinary meanings and refer to any of the recombinant or naturally-occurring forms of the Cathepsin G protein or variants or homologs thereof that maintain Cathepsin G activity (e.g. within at least 50%, 80%, 90%, 95%, 96%, 97%, 98%, 99% or 100% activity compared to Cathepsin G). In some aspects, the variants or homologs have at least 90%, 95%, 96%, 97%, 98%, 99% or 100% amino acid sequence identity across the whole sequence or a portion of the sequence (e.g. a 50, 100, 150 or 200 continuous amino acid portion) compared to a naturally occurring Cathepsin G polypeptide. In embodiments, Cathepsin G is the protein as identified by the NCBI sequence reference GI:4503149, homolog or functional fragment thereof.

[0078] As used herein, the terms “MMP3” or “MMP3 protease” are used in accordance with their plain and ordinary meanings and refer to any of the recombinant or naturally-occurring forms of the matrix metalloproteinase 3 (MMP3) or variants or homologs thereof that maintain MMP3 activity (e.g. within at least 50%, 80%, 90%, 95%, 96%, 97%, 98%, 99% or 100% activity compared to MMP3). In some aspects, the variants or homologs have at least 90%, 95%, 96%, 97%, 98%, 99% or 100% amino acid sequence identity across the whole sequence or a portion of the sequence (e.g. a 50, 100, 150 or 200 continuous amino acid portion) compared to a naturally occurring MMP3 polypeptide. In embodiments, MMP3 is the protein as identified by the NCBI sequence reference GI:77567646, homolog or functional fragment thereof.

[0079] As used herein, the terms “MMP7” or “MMP7 protease” are used in accordance with their plain and ordinary meanings and refer to any of the recombinant or naturally-occurring forms of the matrix metalloproteinase 7 (MMP7) or variants or homologs thereof that maintain MMP7 activity (e.g. within at least 50%, 80%, 90%, 95%, 96%, 97%, 98%, 99% or 100% activity compared to MMP7). In some aspects, the variants or homologs have at least 90%, 95%, 96%, 97%, 98%, 99% or 100% amino acid sequence identity across the whole sequence or a portion of the sequence (e.g. a 50, 100, 150 or 200 continuous amino acid portion) compared to a naturally occurring MMP7 polypeptide. In embodiments, MMP7 is the protein as identified by the NCBI sequence reference GI:116861, homolog or functional fragment thereof.

[0080] As used herein, the terms “MMP12” or “MMP12 protease” are used in accordance with their plain and ordinary meanings and refer to any of the recombinant or naturally-occurring forms of the matrix metalloproteinase 9 (MMP12) or variants or homologs thereof that maintain MMP12 activity (e.g. within at least 50%, 80%, 90%, 95%, 96%, 97%, 98%, 99% or 100% activity compared to MMP12). In some aspects, the variants or homologs have at least 90%, 95%, 96%, 97%, 98%, 99% or 100% amino acid sequence identity across the whole sequence or a portion of the sequence (e.g. a 50, 100, 150 or 200 continuous amino acid portion) compared to a naturally occurring MMP12 polypeptide. In embodiments, MMP12 is the protein as identified by the NCBI sequence reference GI:73858572, homolog or functional fragment thereof.

[0081] As used herein, the term “Type I transmembrane protein” is used in accordance with its plain and ordinary meaning and refers to any of the recombinant or naturally-occurring forms of a membrane protein containing a single-pass transmembrane region, where the N-terminus of the protein is located on the extracellular surface.

[0082] As used herein, the terms “CHO cell” or “Chinese Hamster Ovary cell” are used in accordance with their plain and ordinary meanings and refer to any epithelial cell lines derived from the ovary of the Chinese hamster.

[0083] As used herein, the term “Kabat numbering” or “Kabat position” is used in accordance with its plain and ordinary meaning and refers to a scheme for the numbering of amino acid residues in antibodies based upon variable regions. The scheme is useful when comparing these variable regions between antibodies. In embodiments, the L248 position of the anti-CD20 antibody rituximab correlates with L325 of the antibody sequence according to other numbering systems.

[0084] As used herein, the terms “expression vector” or “expression construct” are used in accordance with their plain and ordinary meanings and refer to any of the recombinant or naturally-occurring forms of a bacterial plasmid, bacmid, or virus or variants or homologs thereof that are for the use of expressing a target gene of interest as a protein product. The target of interest can be any gene of interest, including genes that encode for naturally-occurring proteins, any partial or modified variants of naturally-occurring proteins, chimeric proteins, tagged proteins, or de novo designed protein sequences. The expression vector must contain the elements necessary for gene expression, including, but not limited to, a promoter sequence, a ribosome-binding sequence, a start codon, the target of interest sequence, and a stop codon. The expression vector can be modified by any genetic engineering process or technique, including, but not limited to, polymerase chain reaction (PCR), restriction enzyme digest and DNA ligation, Gibson cloning, and CRISPR-related gene editing.

[0085] As used herein, the term “surface display” is used in accordance with its plain ordinary meaning and refers to a process where a cellular system is used to express a protein or peptide on the cellular surface. The cellular system can be prokaryotic, or eukaryotic, and can include bacteria, yeast, insect, and mammalian cells. The surface display is achieved by expressing the protein of interest as a fusion protein, which is usually comprised of a partial or full sequence from an endogenously-expressed protein in the cellular system of choice and the protein(s) of interest.

[0086] As used herein, the term “cytotoxicity” is used in accordance with its plain ordinary meaning and refers to quality of being toxic to cells.

[0087] As used herein, the terms “antibody-dependent cellular cytotoxicity”, “ADCC”, and “antibody-dependent cell-mediated cytotoxicity” are used in accordance with their plain ordinary meanings and refer to an immune mechanism through which Fc receptor-bearing effector cells can recognize and kill antibody-coated target cells expressing tumor- or pathogen-derived antigens on their surface.

[0088] As used herein, the terms “antibody-dependent cellular phagocytosis” and “ADCP” are used in accordance with their plain ordinary meanings and refer to the mechanism by which antibody-opsonized target cells activate the Fc receptors on the surface of macrophages to induce phagocytosis, resulting the ingestion and degradation of the target cell. The macrophage Fc receptors refer to all classes of Fcγ receptors.

[0089] As used herein, the terms “adaptive immune response”, “acquired immune system”, and “specific immune system” are used in accordance with their plain ordinary meanings and refer to a subsystem of the overall immune system that is composed of specialized, systemic cells and processes that eliminate designated targets. The targets are designated by identification via immunological memory. Immunological memory is created when the immune system had previously encountered the immune assault, and retained a record of it.

[0090] As used herein, the term “dissociation constant” or “Kd” are used in accordance with their plain ordinary meanings and refer to a specific type of equilibrium constant that measures the propensity of two molecules to be associated with each other. In biochemistry, the dissociation constant is used to describe the relative affinity between a protein and a ligand, for example, an affinity of an antibody for an antigen. In general, the dissociation constant Kd can be described by the equation

$$Kd = \frac{[ P ] [ L ]}{[ PL ]}$$

Where [P] is the molar concentration of protein, [L] is the molar concentration of ligand, and [PL] is the molar concentration of the protein-ligand complex.

### II. Antibodies

[0091] In an aspect, provided herein are immunoglobulin G (IgG) antibodies including a Fab region and an Fc region connected through a hinge region, where the hinge region is resistant to cleavage by a protease.

[0092] In embodiments, the IgG antibody is selected from an IgG1 antibody, an IgG2 antibody, an IgG3 antibody, and an IgG4 antibody. In embodiments, the IgG antibody is an IgG1 antibody. In embodiments, the IgG antibody is an IgG2 antibody. In embodiments, the IgG antibody is an IgG3 antibody. In embodiments, the IgG antibody is an IgG4 antibody.

[0093] In embodiments, the hinge region is resistant to cleavage by a protease. In embodiments, resistance to cleavage by a protease means that a protease is unable to cleave the antibody at an amino acid sequence within the hinge region. In embodiments, resistance to cleavage by a protease is conferred by the amino acid sequence of the hinge region. In embodiments, resistance to cleavage by a protease is relative to a natural or wild type hinge region sequence. In embodiments, the natural or wild type hinge sequence is an amino acid sequencing including ELLGGPS (SEQ ID NO: 544). In embodiments, resistance to cleavage by a protease is relative to a known sequence control. In embodiments, the known sequence is an amino acid sequence including ELLGGPS (SEQ ID NO: 544), which is sensitive to cleavage by an IgG endopeptidase. In embodiments, human IgG2 hinge region comprising the amino acid sequence PVAGPS is resistant to IgG endopeptidase cleavage and may serve as a negative control. In embodiments, resistance to cleavage by a protease is above a certain threshold level using a specific known assay. In embodiments, the assay may be enzymatic digestion of IgG and SDS-PAGE and Coomassie staining to determine molecular weight of digested fragments.

[0094] In embodiments, the hinge region includes a protease resistant sequence. In embodiments, the sequence is between amino acid positions 246-252 according to Kabat numbering. In embodiments, the sequence is positions corresponding to Kabat position 246-252. In embodiments, the protease resistant sequence is two or more amino acids in length. In embodiments, the protease resistant sequence is three amino acids in length. In embodiments, the protease resistant sequence is four amino acids in length. In embodiments, the protease resistant sequence is five amino acids in length. In embodiments, the protease resistant sequence is six amino acids in length. In embodiments, the protease resistant sequence is seven amino acids in length. In embodiments, the protease resistant sequence includes the amino acids of SEQ ID NO: 545. In embodiments, the protease resistant sequence includes the amino acids of SEQ ID NO: 546. In embodiments, the protease resistant sequence includes the amino acids of SEQ ID NO: 547.

[0095] In embodiments, the Fc region of an IgG antibody described herein has a dissociation constant of about 1×10⁻⁵ M to about 1×10⁻¹³ M to one or more of CD32 (FcγRII), CD16 (FcγRIII), and CD64 (FcγRI). In embodiments, the Fc region has a dissociation constant of about 1×10⁻⁵ M to about 1×10⁻¹² M, about 1×10⁻⁵ M to about 1×10⁻¹¹ M, about 1×10⁻⁵ M to about 1×10⁻¹⁰ M, about 1×10⁻⁵ M to about 1×10⁻⁹ M, about 1×10⁻⁵ M to about 1×10⁻⁸ M, about 1×10⁻⁵ M to about 1×10⁻⁷ M, about 1×10⁻⁵ M to about 1×10⁻⁶ M, about 1×10⁻⁶ M to about 1×10⁻¹³ M, about 1×10⁻⁶ M to about 1×10⁻¹² M, about 1×10⁻⁶ M to about 1×10⁻¹¹ M, about 1×10⁻⁶ M to about 1×10⁻¹⁰ M, about 1×10⁻⁶ M to about 1×10⁻⁹ M, about 1×10⁻⁶ M to about 1×10⁻⁸ M, about 1×10⁻⁶ M to about 1×10⁻⁷ M, about 1×10⁻⁷ M to about 1×10⁻¹³ M, about 1×10⁻⁷ M to about 1×10⁻¹² M, about 1×10⁻⁷ M to about 1×10⁻¹¹ M, about 1×10⁻⁷ M to about 1×10⁻¹⁰ M, about 1×10⁻⁷ M to about 1×10⁻⁹ M, about 1×10⁻⁷ M to about 1×10⁻⁸ M, about 1×10⁻⁸ M to about 1×10⁻¹³ M, about 1×10⁻⁸ M to about 1×10⁻¹² M, about 1×10⁻⁸ M to about 1×10⁻¹¹ M, about 1×10⁻⁸ M to about 1×10⁻¹⁰ M, about 1×10⁻⁸ M to about 1×10⁻⁹ M, about 1×10⁻⁹ M to about 1×10⁻¹³ M, about 1×10⁻⁹ M to about 1×10⁻¹² M, about 1×10⁻⁹ M to about 1×10⁻¹¹ M, about 1×10⁻⁹ M to about 1×10⁻¹⁰ M, about 1×10⁻¹⁰ M to about 1×10⁻¹³ M, about 1×10⁻¹⁰ M to about 1×10⁻¹² M, about 1×10⁻¹⁰ M to about 1×10⁻¹¹ M, about 1×10⁻¹¹ M to about 1×10⁻¹³ M, about 1×10⁻¹¹ M to about 1×10⁻¹² M, or about 1×10⁻¹² M to about 1×10⁻¹³ M to one or more of CD32 (FcγRII), CD16 (FcγRIII), and CD64 (FcγRI). In embodiments, the Fc region of an IgG antibody described herein has a dissociation constant of about 1×10⁻⁵ M, about 1×10⁻⁶ M, about 1×10⁻⁷ M, about 1×10⁻⁸ M, about 1×10⁻⁹ M, about 1×10⁻¹⁰ M, about 1×10⁻¹¹ M, about 1×10⁻¹² M, or about 1×10⁻¹³ M to one or more of CD32 (FcγRII), CD16 (FcγRIII), and CD64 (FcγRI).

[0096] In embodiments, the Fc region of the IgG antibody has a dissociation constant of about 1×10⁻⁵ M to about 1×10⁻¹³ M to CD32 (FcγRII). In embodiments, the Fc region has a dissociation constant of about 1×10⁻⁵ M to about 1×10⁻¹² M, about 1×10⁻⁵ M to about 1×10⁻¹¹ M, about 1×10⁻⁵ M to about 1×10⁻¹⁰ M, about 1×10⁻⁵ M to about 1×10⁻⁹ M, about 1×10⁻⁵ M to about 1×10⁻⁸ M, about 1×10⁻⁵ M to about 1×10⁻⁷ M, about 1×10⁻⁵ M to about 1×10⁻⁶ M, about 1×10⁻⁶ M to about 1×10⁻¹³ M, about 1×10⁻⁶ M to about 1×10⁻¹² M, about 1×10⁻⁶ M to about 1×10⁻¹¹ M, about 1×10⁻⁶ M to about 1×10⁻¹⁰ M, about 1×10⁻⁶ M to about 1×10⁻⁹ M, about 1×10⁻⁶ M to about 1×10⁻⁸ M, about 1×10⁻⁶ M to about 1×10⁻⁷ M, about 1×10⁻⁷ M to about 1×10⁻¹³ M, about 1×10⁻⁷ M to about 1×10⁻¹² M, about 1×10⁻⁷ M to about 1×10⁻¹¹ M, about 1×10⁻⁷ M to about 1×10⁻¹⁰ M, about 1×10⁻⁷ M to about 1×10⁻⁹ M, about 1×10⁻⁷ M to about 1×10⁻⁸ M, about 1×10⁻⁸ M to about 1×10⁻¹³ M, about 1×10⁻⁸ M to about 1×10⁻¹² M, about 1×10⁻⁸ M to about 1×10⁻¹¹ M, about 1×10⁻⁸ M to about 1×10⁻¹⁰ M, about 1×10⁻⁸ M to about 1×10⁻⁹ M, about 1×10⁻⁹ M to about 1×10⁻¹³ M, about 1×10⁻⁹ M to about 1×10⁻¹² M, about 1×10⁻⁹ M to about 1×10⁻¹¹ M, about 1×10⁻⁹ M to about 1×10⁻¹⁰ M, about 1×10⁻¹⁰ M to about 1×10⁻¹³ M, about 1×10⁻¹⁰ M to about 1×10⁻¹² M, about 1×10⁻¹⁰ M to about 1×10⁻¹¹ M, about 1×10⁻¹¹ M to about 1×10⁻¹³ M, about 1×10⁻¹¹ M to about 1×10⁻¹² M, or about 1×10⁻¹² M to about 1×10⁻¹³ M to CD32 (FcγRII). In embodiments, the Fc region of an IgG antibody described herein has a dissociation constant of about 1×10⁻⁵ M, about 1×10⁻⁶ M, about 1×10⁻⁷ M, about 1×10⁻⁸ M, about 1×10⁻⁹ M, about 1×10⁻¹⁰ M, about 1×10⁻¹¹ M, about 1×10⁻¹² M, or about 1×10⁻¹³ M to CD32 (FcγRII). In embodiments, the Fc region of an IgG antibody described herein has a dissociation constant of about 1×10⁻⁵ M to CD32 (FcγRII). In embodiments, the Fc region of an IgG antibody described herein has a dissociation constant of about 1×10⁻⁶ M to CD32 (FcγRII). In embodiments, the Fc region of an IgG antibody described herein has a dissociation constant of about 1×10⁻⁷ M to CD32 (FcγRII). In embodiments, the Fc region of an IgG antibody described herein has a dissociation constant of about 1×10⁻⁸ M to CD32 (FcγRII). In embodiments, the Fc region of an IgG antibody described herein has a dissociation constant of about 1×10⁻⁹ M to CD32 (FcγRII). In embodiments, the Fc region of an IgG antibody described herein has a dissociation constant of about 1×10⁻¹⁰ M to CD32 (FcγRII). In embodiments, the Fc region of an IgG antibody described herein has a dissociation constant of about 1×10⁻¹¹ M to CD32 (FcγRII). In embodiments, the Fc region of an IgG antibody described herein has a dissociation constant of about 1×10⁻¹² M to CD32 (FcγRII). In embodiments, the Fc region of an IgG antibody described herein has a dissociation constant of about 1×10⁻¹³ M to CD32 (FcγRII).

[0097] In embodiments, the Fc region of the IgG antibody has a dissociation constant of about 1×10⁻⁵ M to about 1×10⁻¹³ M to CD16 (FcγRIII). In embodiments, the Fc region of the IgG antibody has a dissociation constant of about 1×10⁻⁵ M to about 1×10⁻¹³ M to CD16 (FcγRIII). In embodiments, the Fc region has a dissociation constant of about 1×10⁻⁵ M to about 1×10⁻¹² M, about 1×10⁻⁵ M to about 1×10⁻¹¹ M, about 1×10⁻⁵ M to about 1×10⁻¹⁰ M, about 1×10⁻⁵ M to about 1×10⁻⁹ M, about 1×10⁻⁵ M to about 1×10⁻⁸ M, about 1×10⁻⁵ M to about 1×10⁻⁷ M, about 1×10⁻⁵ M to about 1×10⁻⁶ M, about 1×10⁻⁶ M to about 1×10⁻¹³ M, about 1×10⁻⁶ M to about 1×10⁻¹² about 1×10⁻⁶ M to about 1×10⁻¹¹ M, about 1×10⁻⁶ M to about 1×10⁻¹⁰ M, about 1×10⁻⁶ M to about 1×10⁻⁹ M, about 1×10⁻⁶ M to about 1×10⁻⁸ M, about 1×10⁻⁶ M to about 1×10⁻⁷ M, about 1×10⁻⁷ M to about 1×10⁻¹³ M, about 1×10⁻⁷ M to about 1×10⁻¹² M, about 1×10⁻⁷ M to about 1×10⁻¹¹ M, about 1×10⁻⁷ M to about 1×10⁻¹⁰ M, about 1×10⁻⁷ M to about 1×10⁻⁹ M, about 1×10⁻⁷ M to about 1×10⁻⁸ M, about 1×10⁻⁸ M to about 1×10⁻¹³ M, about 1×10⁻⁸ M to about 1×10⁻¹² M, about 1×10⁻⁸ M to about 1×10⁻¹¹ M, about 1×10⁻⁸ M to about 1×10⁻¹⁰ M, about 1×10⁻⁸ M to about 1×10⁻⁹ M, about 1×10⁻⁹ M to about 1×10⁻¹³ M, about 1×10⁻⁹ M to about 1×10⁻¹² M, about 1×10⁻⁹ M to about 1×10⁻¹¹ M, about 1×10⁻⁹ M to about 1×10⁻¹⁰ M, about 1×10⁻¹⁰ M to about 1×10⁻¹³ M, about 1×10⁻¹⁰ M to about 1×10⁻¹² M, about 1×10⁻¹⁰ M to about 1×10⁻¹¹ M, about 1×10⁻¹¹ M to about 1×10⁻¹³ M, about 1×10⁻¹¹ M to about 1×10⁻¹² M, or about 1×10⁻¹² M to about 1×10⁻¹³ M to CD16 (FcγRIII). In embodiments, the Fc region of an IgG antibody described herein has a dissociation constant of about 1×10⁻⁵ M, about 1×10⁻⁶ M, about 1×10⁻⁷ M, about 1×10⁻⁸ M, about 1×10⁻⁹ M, about 1×10⁻¹⁰ M, about 1×10⁻¹¹ M, about 1×10⁻¹² M, or about 1×10⁻¹³ M to CD16 (FcγRIII). In embodiments, the Fc region of an IgG antibody described herein has a dissociation constant of about 1×10⁻⁵ M to CD16 (FcγRIII). In embodiments, the Fc region of an IgG antibody described herein has a dissociation constant of about 1×10⁻⁶ M to CD16 (FcγRIII). In embodiments, the Fc region of an IgG antibody described herein has a dissociation constant of about 1×10⁻⁷ M to CD16 (FcγRIII). In embodiments, the Fc region of an IgG antibody described herein has a dissociation constant of about 1×10⁻⁸ M to CD16 (FcγRIII). In embodiments, the Fc region of an IgG antibody described herein has a dissociation constant of about 1×10⁻⁹ M to CD16 (FcγRIII). In embodiments, the Fc region of an IgG antibody described herein has a dissociation constant of about 1×10⁻¹⁰ M to CD16 (FcγRIII). In embodiments, the Fc region of an IgG antibody described herein has a dissociation constant of about 1×10⁻¹¹ M to CD16 (FcγRIII). In embodiments, the Fc region of an IgG antibody described herein has a dissociation constant of about 1×10⁻¹² M to CD16 (FcγRIII). In embodiments, the Fc region of an IgG antibody described herein has a dissociation constant of about 1×10⁻¹³ M to CD16 (FcγRIII).

[0098] In embodiments, the Fc region of the IgG antibody has a dissociation constant of about 1×10⁻⁵ M to about 1×10⁻¹³ M to CD64 (FcγRI). In embodiments, the Fc region of the IgG antibody has a dissociation constant of about 1×10⁻⁵ M to about 1×10⁻¹³ M to CD64 (FcγRI). In embodiments, the Fc region has a dissociation constant of about 1×10⁻⁵ M to about 1×10⁻¹² M, about 1×10⁻⁵ M to about 1×10⁻¹¹ M, about 1×10⁻⁵ M to about 1×10⁻¹⁰ M, about 1×10⁻⁵ M to about 1×10⁻⁹ M, about 1×10⁻⁵ M to about 1×10⁻⁸ M, about 1×10⁻⁵ M to about 1×10⁻⁷ M, about 1×10⁻⁵ M to about 1×10⁻⁶ M, about 1×10⁻⁶ M to about 1×10⁻¹³ M, about 1×10⁻⁶ M to about 1×10⁻¹² M, about 1×10⁻⁶ M to about 1×10⁻¹¹ M, about 1×10⁻⁶ M to about 1×10⁻¹⁰ M, about 1×10⁻⁶ M to about 1×10⁻⁹ M, about 1×10⁻⁶ M to about 1×10⁻⁸ M, about 1×10⁻⁶ M to about 1×10⁻⁷ M, about 1×10⁻⁷ M to about 1×10⁻¹³ M, about 1×10⁻⁷ M to about 1×10⁻¹² M, about 1×10⁻⁷ M to about 1×10⁻¹¹ M, about 1×10⁻⁷ M to about 1×10⁻¹⁰ M, about 1×10⁻⁷ M to about 1×10⁻⁹ M, about 1×10⁻⁷ M to about 1×10⁻⁸ M, about 1×10⁻⁸ M to about 1×10⁻¹³ M, about 1×10⁻⁸ M to about 1×10⁻¹² M, about 1×10⁻⁸ M to about 1×10⁻¹¹ M, about 1×10⁻⁸ M to about 1×10⁻¹⁰ M, about 1×10⁻⁸ M to about 1×10⁻⁹ M, about 1×10⁻⁹ M to about 1×10⁻¹³ M, about 1×10⁻⁹ M to about 1×10⁻¹² M, about 1×10⁻⁹ M to about 1×10⁻¹¹ M, about 1×10⁻⁹ M to about 1×10⁻¹⁰ M, about 1×10⁻¹⁰ M to about 1×10⁻¹³ M, about 1×10⁻¹⁰ M to about 1×10⁻¹² M, about 1×10⁻¹⁰ M to about 1×10⁻¹¹ M, about 1×10⁻¹¹ M to about 1×10⁻¹³ M, about 1×10⁻¹¹ M to about 1×10⁻¹² M, or about 1×10⁻¹² M to about 1×10⁻¹³ M to CD64 (FcγRI). In embodiments, the Fc region of an IgG antibody described herein has a dissociation constant of about 1×10⁻⁵ M, about 1×10⁻⁶ M, about 1×10⁻⁷ M, about 1×10⁻⁸ M, about 1×10⁻⁹ M, about 1×10⁻¹⁰ M, about 1×10⁻¹¹ M, about 1×10⁻¹² M, or about 1×10⁻¹³ M to CD64 (FcγRI). In embodiments, the Fc region of an IgG antibody described herein has a dissociation constant of about 1×10⁻⁵ M to CD64 (FcγRI) In embodiments, the Fc region of an IgG antibody described herein has a dissociation constant of about 1×10⁻⁶ M to CD64 (FcγRI). In embodiments, the Fc region of an IgG antibody described herein has a dissociation constant of about 1×10⁻⁷ M to CD64 (FcγRI). In embodiments, the Fc region of an IgG antibody described herein has a dissociation constant of about 1×10⁻⁸ M to CD64 (FcγRI). In embodiments, the Fc region of an IgG antibody described herein has a dissociation constant of about 1×10⁻⁹ M to CD64 (FcγRI). In embodiments, the Fc region of an IgG antibody described herein has a dissociation constant of about 1×10⁻¹⁰ M to CD64 (FcγRI). In embodiments, the Fc region of an IgG antibody described herein has a dissociation constant of about 1×10⁻¹¹ M to CD64 (FcγRI). In embodiments, the Fc region of an IgG antibody described herein has a dissociation constant of about 1×10⁻¹² M to CD64 (FcγRI). In embodiments, the Fc region of an IgG antibody described herein has a dissociation constant of about 1×10⁻¹³ M to CD64 (FcγRI).

[0099] In embodiments, the IgG antibody includes a protease resistant sequence resistant to cleavage by a protease. In embodiments, the protease is an IgG specific protease. In embodiments, the protease is an IgG endopeptidase. In embodiments, the IgG endopeptidase is selected from IdeS and IdeZ. In embodiments, the IgG antibody includes a protease resistant sequence resistant to cleavage by IdeS protease. In embodiments, the IgG antibody includes a protease resistant sequence resistant to cleavage by IdeZ protease.

[0100] In embodiments, the IgG antibody includes a protease resistant sequence resistant to cleavage by a protease specific for an ELLGGPS (SEQ ID NO: 544) amino acid sequence. In embodiments, the ELLGGPS amino acid sequence specific protease, includes but is not limited to, pepsin, matrix metalloproteinase 7 (MMP7), matrix metalloproteinase 3 (MMP3), matrix metalloproteinase (MMP12), cathepsin G, and glutamyl endopeptidase V8 (GluV8). In embodiments, the IgG antibody includes a protease resistant sequence resistant to cleavage by pepsin. In embodiments, the IgG antibody includes a protease resistant sequence resistant to cleavage by matrix metalloproteinase 7 (MMP7). In embodiments, the IgG antibody includes a protease resistant sequence resistant to cleavage by matrix metalloproteinase 3 (MMP3). In embodiments, the IgG antibody includes a protease resistant sequence resistant to cleavage by matrix metalloproteinase (MMP12). In embodiments, the IgG antibody includes a protease resistant sequence resistant to cleavage by cathepsin G. In embodiments, the IgG antibody includes a protease resistant sequence resistant to cleavage by glutamyl endopeptidase V8 (GluV8).

[0101] In an aspect, provided herein are immunoglobulin G (IgG) antibodies, including a Fab region and an Fc region connected through a hinge region, where the Fc region has a dissociation constant of about 1×10⁻⁵ M to about 1×10⁻¹³ M to one or more of CD32 (FcγRII), CD16 (FcγRIII), and CD64 (FcγRI).

[0102] In embodiments, the IgG antibody is selected from an IgG1 antibody, an IgG2 antibody, an IgG3 antibody, and an IgG4 antibody. In embodiments, the IgG antibody is an IgG1 antibody. In embodiments, the IgG antibody is an IgG2 antibody. In embodiments, the IgG antibody is an IgG3 antibody. In embodiments, the IgG antibody is an IgG4 antibody.

[0103] In embodiments, the Fc region of an IgG antibody described herein has a dissociation constant of about 1×10⁻⁵ M to about 1×10⁻¹³ M to one or more of CD32 (FcγRII), CD16 (FcγRIII), and CD64 (FcγRI). In embodiments, the Fc region has a dissociation constant of about 1×10⁻⁵ M to about 1×10⁻¹² M, about 1×10⁻⁵ M to about 1×10⁻¹¹ M, about 1×10⁻⁵ M to about 1×10⁻¹⁰ M, about 1×10⁻⁵ M to about 1×10⁻⁹ M, about 1×10⁻⁵ M to about 1×10⁻⁸ M, about 1×10⁻⁵ M to about 1×10⁻⁷ M, about 1×10⁻⁵ M to about 1×10⁻⁶ M, about 1×10⁻⁶ M to about 1×10⁻¹³ M, about 1×10⁻⁶ M to about 1×10⁻¹² M, about 1×10⁻⁶ M to about 1×10⁻¹¹ M, about 1×10⁻⁶ M to about 1×10⁻¹⁰ M, about 1×10⁻⁶ M to about 1×10⁻⁹ M, about 1×10⁻⁶ M to about 1×10⁻⁸ M, about 1×10⁻⁶ M to about 1×10⁻⁷ M, about 1×10⁻⁷ M to about 1×10⁻¹³ M, about 1×10⁻⁷ M to about 1×10⁻¹² M, about 1×10⁻⁷ M to about 1×10⁻¹¹ M, about 1×10⁻⁷ M to about 1×10⁻¹⁰ M, about 1×10⁻⁷ M to about 1×10⁻⁹ M, about 1×10⁻⁷ M to about 1×10⁻⁸ M, about 1×10⁻⁸ M to about 1×10⁻¹³ M, about 1×10⁻⁸ M to about 1×10⁻¹² M, about 1×10⁻⁸ M to about 1×10⁻¹¹ M, about 1×10⁻⁸ M to about 1×10⁻¹⁰ M, about 1×10⁻⁸ M to about 1×10⁻⁹ M, about 1×10⁻⁹ M to about 1×10⁻¹³ M, about 1×10⁻⁹ M to about 1×10⁻¹² M, about 1×10⁻⁹ M to about 1×10⁻¹¹ M, about 1×10⁻⁹ M to about 1×10⁻¹⁰ M, about 1×10⁻¹⁰ M to about 1×10⁻¹³ M, about 1×10⁻¹⁰ M to about 1×10⁻¹² M, about 1×10⁻¹⁰ M to about 1×10⁻¹¹ M, about 1×10⁻¹¹ M to about 1×10⁻¹³ M, about 1×10⁻¹¹ M to about 1×10⁻¹² M, or about 1×10⁻¹² M to about 1×10⁻¹³ M to one or more of CD32 (FcγRII), CD16 (FcγRIII), and CD64 (FcγRI). In embodiments, the Fc region of an IgG antibody described herein has a dissociation constant of about 1×10⁻⁵ M, about 1×10⁻⁶ M, about 1×10⁻⁷ M, about 1×10⁻⁸ M, about 1×10⁻⁹ M, about 1×10⁻¹⁰ M, about 1×10⁻¹¹ M, about 1×10⁻¹² M, or about 1×10⁻¹³ M to one or more of CD32 (FcγRII), CD16 (FcγRIII), and CD64 (FcγRI).

[0104] In embodiments, the Fc region of the IgG antibody has a dissociation constant of about 1×10⁻⁵ M to about 1×10⁻¹³ M to CD32 (FcγRII). In embodiments, the Fc region has a dissociation constant of about 1×10⁻⁵ M to about 1×10⁻¹² M, about 1×10⁻⁵ M to about 1×10⁻¹¹ M, about 1×10⁻⁵ M to about 1×10⁻¹⁰ M, about 1×10⁻⁵ M to about 1×10⁻⁹ M, about 1×10⁻⁵ M to about 1×10⁻⁸ M, about 1×10⁻⁵ M to about 1×10⁻⁷ M, about 1×10⁻⁵ M to about 1×10⁻⁶ M, about 1×10⁻⁶ M to about 1×10⁻¹³ M, about 1×10⁻⁶ M to about 1×10⁻¹² M, about 1×10⁻⁶ M to about 1×10⁻¹¹ M, about 1×10⁻⁶ M to about 1×10⁻¹⁰ M, about 1×10⁻⁶ M to about 1×10⁻⁹ M, about 1×10⁻⁶ M to about 1×10⁻⁸ M, about 1×10⁻⁶ M to about 1×10⁻⁷ M, about 1×10⁻⁷ M to about 1×10⁻¹³ M, about 1×10⁻⁷ M to about 1×10⁻¹² M, about 1×10⁻⁷ M to about 1×10⁻¹¹ M, about 1×10⁻⁷ M to about 1×10⁻¹⁰ M, about 1×10⁻⁷ M to about 1×10⁻⁹ M, about 1×10⁻⁷ M to about 1×10⁻⁸ M, about 1×10⁻⁸ M to about 1×10⁻¹³ M, about 1×10⁻⁸ M to about 1×10⁻¹² M, about 1×10⁻⁸ M to about 1×10⁻¹¹ M, about 1×10⁻⁸ M to about 1×10⁻¹⁰ M, about 1×10⁻⁸ M to about 1×10⁻⁹ M, about 1×10⁻⁹ M to about 1×10⁻¹³ M, about 1×10⁻⁹ M to about 1×10⁻¹² M, about 1×10⁻⁹ M to about 1×10⁻¹¹ M, about 1×10⁻⁹ M to about 1×10⁻¹⁰ M, about 1×10⁻¹⁰ M to about 1×10⁻¹³ M, about 1×10⁻¹⁰ M to about 1×10⁻¹² M, about 1×10⁻¹⁰ M to about 1×10⁻¹¹ M, about 1×10⁻¹¹ M to about 1×10⁻¹³ M, about 1×10⁻¹¹ M to about 1×10⁻¹² M, or about 1×10⁻¹² M to about 1×10⁻¹³ M to CD32 (FcγRII). In embodiments, the Fc region of an IgG antibody described herein has a dissociation constant of about 1×10⁻⁵ M, about 1×10⁻⁶ M, about 1×10⁻⁷ M, about 1×10⁻⁸ M, about 1×10⁻⁹ M, about 1×10⁻¹⁰ M, about 1×10⁻¹¹ M, about 1×10⁻¹² M, or about 1×10⁻¹³ M to CD32 (FcγRII). In embodiments, the Fc region of an IgG antibody described herein has a dissociation constant of about 1×10⁻⁵ M to CD32 (FcγRII). In embodiments, the Fc region of an IgG antibody described herein has a dissociation constant of about 1×10⁻⁶ M to CD32 (FcγRII). In embodiments, the Fc region of an IgG antibody described herein has a dissociation constant of about 1×10⁻⁷ M to CD32 (FcγRII). In embodiments, the Fc region of an IgG antibody described herein has a dissociation constant of about 1×10⁻⁸ M to CD32 (FcγRII). In embodiments, the Fc region of an IgG antibody described herein has a dissociation constant of about 1×10⁻⁹ M to CD32 (FcγRII). In embodiments, the Fc region of an IgG antibody described herein has a dissociation constant of about 1×10⁻¹⁰ M to CD32 (FcγRII). In embodiments, the Fc region of an IgG antibody described herein has a dissociation constant of about 1×10⁻¹¹ M to CD32 (FcγRII). In embodiments, the Fc region of an IgG antibody described herein has a dissociation constant of about 1×10⁻¹² M to CD32 (FcγRII). In embodiments, the Fc region of an IgG antibody described herein has a dissociation constant of about 1×10⁻¹³ M to CD32 (FcγRII).

[0105] In embodiments, the Fc region of the IgG antibody has a dissociation constant of about 1×10⁻⁵ M to about 1×10⁻¹³ M to CD16 (FcγRIII). In embodiments, the Fc region of the IgG antibody has a dissociation constant of about 1×10⁻⁵ M to about 1×10⁻¹³ M to CD16 (FcγRIII). In embodiments, the Fc region has a dissociation constant of about 1×10⁻⁵ M to about 1×10⁻¹² M, about 1×10⁻⁵ M to about 1×10⁻¹¹ M, about 1×10⁻⁵ M to about 1×10⁻¹⁰ M, about 1×10⁻⁵ M to about 1×10⁻⁹ M, about 1×10⁻⁵ M to about 1×10⁻⁸ M, about 1×10⁻⁵ M to about 1×10⁻⁷ M, about 1×10⁻⁵ M to about 1×10⁻⁶ M, about 1×10⁻⁶ M to about 1×10⁻¹³ M, about 1×10⁻⁶ M to about 1×10⁻¹² M, about 1×10⁻⁶ M to about 1×10⁻¹¹ M, about 1×10⁻⁶ M to about 1×10⁻¹⁰ M, about 1×10⁻⁶ M to about 1×10⁻⁹ M, about 1×10⁻⁶ M to about 1×10⁻⁸ M, about 1×10⁻⁶ M to about 1×10⁻⁷ M, about 1×10⁻⁷ M to about 1×10⁻¹³ M, about 1×10⁻⁷ M to about 1×10⁻¹² M, about 1×10⁻⁷ M to about 1×10⁻¹¹ M, about 1×10⁻⁷ M to about 1×10⁻¹⁰ M, about 1×10⁻⁷ M to about 1×10⁻⁹ M, about 1×10⁻⁷ M to about 1×10⁻⁸ M, about 1×10⁻⁸ M to about 1×10⁻¹³ M, about 1×10⁻⁸ M to about 1×10⁻¹² M, about 1×10⁻⁸ M to about 1×10⁻¹¹ M, about 1×10⁻⁸ M to about 1×10⁻¹⁰ M, about 1×10⁻⁸ M to about 1×10⁻⁹ M, about 1×10⁻⁹ M to about 1×10⁻¹³ M, about 1×10⁻⁹ M to about 1×10⁻¹² M, about 1×10⁻⁹ M to about 1×10⁻¹¹ M, about 1×10⁻⁹ M to about 1×10⁻¹⁰ M, about 1×10⁻¹⁰ M to about 1×10⁻¹³ M, about 1×10⁻¹⁰ M to about 1×10⁻¹² M, about 1×10⁻¹⁰ M to about 1×10⁻¹¹ M, about 1×10⁻¹¹ M to about 1×10⁻¹³ M, about 1×10⁻¹¹ M to about 1×10⁻¹² M, or about 1×10⁻¹² M to about 1×10⁻¹³ M to CD16 (FcγRIII). In embodiments, the Fc region of an IgG antibody described herein has a dissociation constant of about 1×10⁻⁵ M, about 1×10⁻⁶ M, about 1×10⁻⁷ M, about 1×10⁻⁸ M, about 1×10⁻⁹ M, about 1×10⁻¹⁰ M, about 1×10⁻¹¹ M, about 1×10⁻¹² M, or about 1×10⁻¹³ M to CD16 (FcγRIII). In embodiments, the Fc region of an IgG antibody described herein has a dissociation constant of about 1×10⁻⁵ M to CD16 (FcγRIII). In embodiments, the Fc region of an IgG antibody described herein has a dissociation constant of about 1×10⁻⁶ M to CD16 (FcγRIII). In embodiments, the Fc region of an IgG antibody described herein has a dissociation constant of about 1×10⁻⁷ M to CD16 (FcγRIII). In embodiments, the Fc region of an IgG antibody described herein has a dissociation constant of about 1×10⁻⁸ M to CD16 (FcγRIII). In embodiments, the Fc region of an IgG antibody described herein has a dissociation constant of about 1×10⁻⁹ M to CD16 (FcγRIII). In embodiments, the Fc region of an IgG antibody described herein has a dissociation constant of about 1×10⁻¹⁰ M to CD16 (FcγRIII). In embodiments, the Fc region of an IgG antibody described herein has a dissociation constant of about 1×10⁻¹¹ M to CD16 (FcγRIII). In embodiments, the Fc region of an IgG antibody described herein has a dissociation constant of about 1×10⁻¹² M to CD16 (FcγRIII). In embodiments, the Fc region of an IgG antibody described herein has a dissociation constant of about 1×10⁻¹³ M to CD16 (FcγRIII).

[0106] In embodiments, the Fc region of the IgG antibody has a dissociation constant of about 1×10⁻⁵ M to about 1×10⁻¹³ M to CD64 (FcγRI). In embodiments, the Fc region of the IgG antibody has a dissociation constant of about 1×10⁻⁵ M to about 1×10⁻¹³ M to CD64 (FcγRI). In embodiments, the Fc region has a dissociation constant of about 1×10⁻⁵ M to about 1×10⁻¹² M, about 1×10⁻⁵ M to about 1×10⁻¹¹ M, about 1×10⁻⁵ M to about 1×10⁻¹⁰ M, about 1×10⁻⁵ M to about 1×10⁻⁹ M, about 1×10⁻⁵ M to about 1×10⁻⁸ M, about 1×10⁻⁵ M to about 1×10⁻⁷ M, about 1×10⁻⁵ M to about 1×10⁻⁶ M, about 1×10⁻⁶ M to about 1×10⁻¹³ M, about 1×10⁻⁶ M to about 1×10⁻¹² M, about 1×10⁻⁶ M to about 1×10⁻¹¹ M , about 1×10⁻⁶ M to about 1×10⁻¹⁰ M, about 1×10⁻⁶ M to about 1×10⁻⁹ M, about 1×10⁻⁶ M to about 1×10⁻⁸ M, about 1×10⁻⁶ M to about 1×10⁻⁷ M, about 1×10⁻⁷ M to about 1×10⁻¹³ M, about 1×10⁻⁷ M to about 1×10⁻¹² M, about 1×10⁻⁷ M to about 1×10⁻¹¹ M, about 1×10⁻⁷ M to about 1×10⁻¹⁰ M, about 1×10⁻⁷ M to about 1×10⁻⁹ M, about 1×10⁻⁷ M to about 1×10⁻⁸ M, about 1×10⁻⁸ M to about 1×10⁻¹³ M, about 1×10⁻⁸ M to about 1×10⁻¹² M, about 1×10⁻⁸ M to about 1×10⁻¹¹ M, about 1×10⁻⁸ M to about 1×10⁻¹⁰ M, about 1×10⁻⁸ M to about 1×10⁻⁹ M, about 1×10⁻⁹ M to about 1×10⁻¹³ M, about 1×10⁻⁹ M to about 1×10⁻¹² M, about 1×10⁻⁹ M to about 1×10⁻¹¹ M, about 1×10⁻⁹ M to about 1×10⁻¹⁰ M, about 1×10⁻¹⁰ M to about 1×10⁻¹³ M, about 1×10⁻¹⁰ M to about 1×10⁻¹² M, about 1×10⁻¹⁰ M to about 1×10⁻¹¹ M, about 1×10⁻¹¹ M to about 1×10⁻¹³ M, about 1×10⁻¹¹ M to about 1×10⁻¹² M, or about 1×10⁻¹² M to about 1×10⁻¹³ M to CD64 (FcγRI). In embodiments, the Fc region of an IgG antibody described herein has a dissociation constant of about 1×10⁻⁵ M, about 1×10⁻⁶ M, about 1×10⁻⁷ M, about 1×10⁻⁸ M, about 1×10⁻⁹ M, about 1×10⁻¹⁰ M, about 1×10⁻¹¹ M, about 1×10⁻¹² M, or about 1×10⁻¹³ M to CD64 (FcγRI). In embodiments, the Fc region of an IgG antibody described herein has a dissociation constant of about 1×10⁻⁵ M to CD64 (FcγRI) In embodiments, the Fc region of an IgG antibody described herein has a dissociation constant of about 1×10⁻⁶ M to CD64 (FcγRI). In embodiments, the Fc region of an IgG antibody described herein has a dissociation constant of about 1×10⁻⁷ M to CD64 (FcγRI). In embodiments, the Fc region of an IgG antibody described herein has a dissociation constant of about 1×10⁻⁸ M to CD64 (FcγRI). In embodiments, the Fc region of an IgG antibody described herein has a dissociation constant of about 1×10⁻⁹ M to CD64 (FcγRI). In embodiments, the Fc region of an IgG antibody described herein has a dissociation constant of about 1×10⁻¹⁰ M to CD64 (FcγRI). In embodiments, the Fc region of an IgG antibody described herein has a dissociation constant of about 1×10⁻¹¹ M to CD64 (FcγRI). In embodiments, the Fc region of an IgG antibody described herein has a dissociation constant of about 1×10⁻¹² M to CD64 (FcγRI). In embodiments, the Fc region of an IgG antibody described herein has a dissociation constant of about 1×10⁻¹³ M to CD64 (FcγRI).

[0107] In embodiments, the Fc region includes one or more amino acid substitutions conferring higher binding affinity for one or more of CD32 (FcγRII), CD16 (FcγRIII), and CD64 (FcγRI) compared to a wild type Fc. In embodiments, the Fc region includes one or more amino acid substitutions conferring higher binding affinity for CD32 (FcγRII) compared to a wild type Fc. In embodiments, the Fc region includes one or more amino acid substitutions conferring higher binding affinity for CD16 (FcγRIII) compared to a wild type Fc. In embodiments, the Fc region includes one or more amino acid substitutions conferring higher binding affinity for CD64 (FcγRI) compared to a wild type Fc.

[0108] In embodiments, the Fc region includes one or more amino acid substitutions that confers higher binding affinity for CD16 (FcγRIII) compared to wild type and is selected from S252D, I351E, and A349L according to Kabat numbering. In embodiments, the Fc region includes a S252D amino acid substitution. In embodiments, the Fc region includes an I351E amino acid substitution. In embodiments, the Fc region includes an A349L amino acid substitution. In embodiments, the Fc region includes S252D and I351E amino acid substitutions. In embodiments, the Fc region includes S252D, I351E, and A349L amino acid substitutions.

[0109] In embodiments, the Fc region of the IgG antibody has a dissociation constant of about 1×10⁻⁵ M to about 1×10⁻¹³ M to CD32 (FcγRII). In an embodiments, the Fc region of the IgG antibody has a dissociation constant of about 1×10⁻⁵ M to about 1×10⁻¹³ M to CD16 (FcγRIII). In an embodiments, the Fc region of the IgG antibody has a dissociation constant of about 1×10⁻⁵ M to about 1×10⁻¹³ M to CD64 (FcγRI).

[0110] In embodiments, the IgG antibody includes a protease resistant sequence resistant to cleavage by a protease. In embodiments, the protease is an IgG specific protease. In embodiments, the IgG specific protease is selected from IdeS and IdeZ. In embodiments, the IgG antibody includes a protease resistant sequence resistant to cleavage by IdeS protease. In embodiments, the IgG antibody includes a protease resistant sequence resistant to cleavage by IdeZ protease.

[0111] In embodiments, the IgG antibody includes a protease resistant sequence resistant to cleavage by a protease specific for an ELLGGPS amino acid sequence (SEQ ID NO: 544). In embodiments, the ELLGGPS amino acid sequence specific protease, includes but is not limited to, pepsin, matrix metalloproteinase 7 (MMP7), matrix metalloproteinase 3 (MMP3), matrix metalloproteinase (MMP12), cathepsin G, and glutamyl endopeptidase V8 (GluV8). In embodiments, the IgG antibody includes a protease resistant sequence resistant to cleavage by pepsin. In embodiments, the IgG antibody includes a protease resistant sequence resistant to cleavage by matrix metalloproteinase 7 (MMP7). In embodiments, the IgG antibody includes a protease resistant sequence resistant to cleavage by matrix metalloproteinase 3 (MMP3). In embodiments, the IgG antibody includes a protease resistant sequence resistant to cleavage by matrix metalloproteinase (MMP12). In embodiments, the IgG antibody includes a protease resistant sequence resistant to cleavage by cathepsin G. In embodiments, the IgG antibody includes a protease resistant sequence resistant to cleavage by glutamyl endopeptidase V8 (GluV8).

[0112] In embodiments, the hinge region includes a protease resistant sequence. In embodiments, the sequence is between amino acid positions 246-252 according to Kabat numbering. In embodiments, the sequence is between positions corresponding to Kabat position 246-252. In embodiments, the protease resistant sequence is two or more amino acids in length. In embodiments, the protease resistant sequence is three amino acids in length. In embodiments, the protease resistant sequence is four amino acids in length. In embodiments, the protease resistant sequence is five amino acids in length. In embodiments, the protease resistant sequence is six amino acids in length. In embodiments, the protease resistant sequence is seven amino acids in length. In embodiments, the protease resistant sequence includes the amino acids of SEQ ID NO: 545. In embodiments, the protease resistant sequence includes the amino acids of SEQ ID NO: 546. In embodiments, the protease resistant sequence includes the amino acids of SEQ ID NO: 547.

### III. Recombinant Proteins

[0113] In an aspect, provided herein are recombinant proteins including a Type I transmembrane domain, an immunoglobulin G (IgG) antibody, wherein the transmembrane domain is fused to the C-terminus of the IgG antibody, where the recombinant protein is resistant to cleavage by a protease.

[0114] In embodiments, the Type I transmembrane domain is capable of dimerization. In embodiments, the Type I transmembrane domain is selected from an EGFR, PDGFR-alpha, PDGFR-beta, HER2, HER3, HER4, FGFR1, FGFR2, FGFR3, FGFR4, VEGFR1, VEGFR2, VEGFR3, Trk-A, Trk-B, Trk-C, and insulin receptor transmembrane domain. In embodiments, the Type I transmembrane domain is an EGFR transmembrane domain. In embodiments, the Type I transmembrane domain is a PDGFR-alpha transmembrane domain. In embodiments, the Type I transmembrane domain is a PDGFR-beta transmembrane domain. In embodiments, the Type I transmembrane domain is an HER2 transmembrane domain. In embodiments, the Type I transmembrane domain is an HER3 transmembrane domain. In embodiments, the Type I transmembrane domain is an HER4 transmembrane domain. In embodiments, the Type I transmembrane domain is an FGFR1 transmembrane domain. In embodiments, the Type I transmembrane domain is an FGFR2 transmembrane domain. In embodiments, the Type I transmembrane domain is an FGFR3 transmembrane domain. In embodiments, the Type I transmembrane domain is an FGFR4 transmembrane domain. In embodiments, the Type I transmembrane domain is a VEGFR1 transmembrane domain. In embodiments, the Type I transmembrane domain is a VEGFR2 transmembrane domain. In embodiments, the Type I transmembrane domain is a VEGFR3 transmembrane domain. In embodiments, the Type I transmembrane domain is a Trk-A transmembrane domain. In embodiments, the Type I transmembrane domain is a Trk-B transmembrane domain. In embodiments, the Type I transmembrane domain is a Trk-C transmembrane domain. In embodiments, the Type I transmembrane domain is an insulin receptor transmembrane domain.

[0115] In embodiments, the recombinant protein includes an IgG antibody selected from IgG1, IgG2, IgG3, and IgG4. In embodiments, the IgG antibody is IgG1 antibody. In embodiments, the IgG antibody is IgG2 antibody. In embodiments, the IgG antibody is IgG3 antibody. In embodiments, the IgG antibody is IgG4 antibody.

[0116] In embodiments of the recombinant proteins provided herein, the IgG antibody includes an Fc (fragment crystallizable) region, a Fab (antigen-binding fragment) region, and a hinge region. In embodiments, the IgG antibody includes an Fc (fragment crystallizable) region. In embodiments, the IgG antibody includes a Fab (garment crystallizable) region. In embodiments, the IgG antibody includes an Fc (antigen-binding fragment) region. In embodiments, the recombinant protein wherein the IgG antibody includes a hinge region.

[0117] In embodiments of the recombinant proteins provided herein, the hinge region includes a protease resistant sequence. In embodiments, the sequence is between amino acid positions 246-252 according to Kabat numbering. In embodiments, the sequence is between positions corresponding to Kabat positions 246-252. In embodiments, the protease resistant sequence is two or more amino acids in length. In embodiments, the protease resistant sequence is three amino acids in length. In embodiments, the protease resistant sequence is four amino acids in length. In embodiments, the protease resistant sequence is five amino acids in length. In embodiments, the protease resistant sequence is six amino acids in length. In embodiments, the protease resistant sequence is seven amino acids in length. In embodiments, the protease resistant sequence includes the amino acids of SEQ ID NO: 546. In embodiments, the protease resistant sequence includes the amino acids of SEQ ID NO: 545. In embodiments, the protease resistant sequence includes the amino acids of SEQ ID NO: 547.

[0118] In embodiments of the recombinant proteins provided herein, the Fc region of an IgG antibody described herein has a dissociation constant of about 1×10⁻⁵ M to about 1×10⁻¹³ M to one or more of CD32 (FcγRII), CD16 (FcγRIII), and CD64 (FcγRI). In embodiments, the Fc region has a dissociation constant of about 1×10⁻⁵ M to about 1×10⁻¹² M, about 1×10⁻⁵ M to about 1×10⁻¹¹ M, about 1×10⁻⁵ M to about 1×10⁻¹⁰ M, about 1×10⁻⁵ M to about 1×10⁻⁹ M, about 1×10⁻⁵ M to about 1×10⁻⁸ M, about 1×10⁻⁵ M to about 1×10⁻⁷ M, about 1×10⁻⁵ M to about 1×10⁻⁶ M, about 1×10⁻⁶ M to about 1×10⁻¹³ M, about 1×10⁻⁶ M to about 1×10⁻¹² M, about 1×10⁻⁶ M to about 1×10⁻¹¹ M, about 1×10⁻⁶ M to about 1×10⁻¹⁰ M, about 1×10⁻⁶ M to about 1×10⁻⁹ M, about 1×10⁻⁶ M to about 1×10⁻⁸ M, about 1×10⁻⁶ M to about 1×10⁻⁷ M, about 1×10⁻⁷ M to about 1×10⁻¹³ M, about 1×10⁻⁷ M to about 1×10⁻¹² M, about 1×10⁻⁷ M to about 1×10⁻¹¹ M, about 1×10⁻⁷ M to about 1×10⁻¹⁰ M, about 1×10⁻⁷ M to about 1×10⁻⁹ M, about 1×10⁻⁷ M to about 1×10⁻⁸ M, about 1×10⁻⁸ M to about 1×10⁻¹³ M, about 1×10⁻⁸ M to about 1×10⁻¹² M, about 1×10⁻⁸ M to about 1×10⁻¹¹ M, about 1×10⁻⁸ M to about 1×10⁻¹⁰ M, about 1×10⁻⁸ M to about 1×10⁻⁹ M, about 1×10⁻⁹ M to about 1×10⁻¹³ M, about 1×10⁻⁹ M to about 1×10⁻¹² M, about 1×10⁻⁹ M to about 1×10⁻¹¹ M, about 1×10⁻⁹ M to about 1×10⁻¹⁰ M, about 1×10⁻¹⁰ M to about 1×10⁻¹³ M, about 1×10⁻¹⁰ M to about 1×10⁻¹² M, about 1×10⁻¹⁰ M to about 1×10⁻¹¹ M, about 1×10⁻¹¹ M to about 1×10⁻¹³ M, about 1×10⁻¹¹ M to about 1×10⁻¹² M, or about 1×10⁻¹² M to about 1×10⁻¹³ M to one or more of CD32 (FcγRII), CD16 (FcγRIII), and CD64 (FcγRI). In embodiments, the Fc region of an IgG antibody described herein has a dissociation constant of about 1×10⁻⁵ M, about 1×10⁻⁶ M, about 1×10⁻⁷ M, about 1×10⁻⁸ M, about 1×10⁻⁹ M, about 1×10⁻¹⁰ M, about 1×10⁻¹¹ M, about 1×10⁻¹² M, or about 1×10⁻¹³ M to one or more of CD32 (FcγRII), CD16 (FcγRIII), and CD64 (FcγRI).

[0119] In embodiments of the recombinant proteins provided herein, the Fc region of the IgG antibody has a dissociation constant of about 1×10⁻⁵ M to about 1×10⁻¹³ M to CD32 (FcγRII). In embodiments, the Fc region has a dissociation constant of about 1×10⁻⁵ M to about 1×10⁻¹² M, about 1×10⁻⁵ M to about 1×10⁻¹¹ M, about 1×10⁻⁵ M to about 1×10⁻¹⁰ M, about 1×10⁻⁵ M to about 1×10⁻⁹ M, about 1×10⁻⁵ M to about 1×10⁻⁸ M, about 1×10⁻⁵ M to about 1×10⁻⁷ M, about 1×10⁻⁵ M to about 1×10⁻⁶ M, about 1×10⁻⁶ M to about 1×10⁻¹³ M, about 1×10⁻⁶ M to about 1×10⁻¹² M, about 1×10⁻⁶ M to about 1×10⁻¹¹ M, about 1×10⁻⁶ M to about 1×10⁻¹⁰ M, about 1×10⁻⁶ M to about 1×10⁻⁹ M, about 1×10⁻⁶ M to about 1×10⁻⁸ M, about 1×10⁻⁶ M to about 1×10⁻⁷ M, about 1×10⁻⁷ M to about 1×10⁻¹³ M, about 1×10⁻⁷ M to about 1×10⁻¹² M, about 1×10⁻⁷ M to about 1×10⁻¹¹ M, about 1×10⁻⁷ M to about 1×10⁻¹⁰ M, about 1×10⁻⁷ M to about 1×10⁻⁹ M, about 1×10⁻⁷ M to about 1×10⁻⁸ M, about 1×10⁻⁸ M to about 1×10⁻¹³ M, about 1×10⁻⁸ M to about 1×10⁻¹² M, about 1×10⁻⁸ M to about 1×10⁻¹¹ M, about 1×10⁻⁸ M to about 1×10⁻¹⁰ M, about 1×10⁻⁸ M to about 1×10⁻⁹ M, about 1×10⁻⁹ M to about 1×10⁻¹³ M, about 1×10⁻⁹ M to about 1×10⁻¹² M, about 1×10⁻⁹ M to about 1×10⁻¹¹ M, about 1×10⁻⁹ M to about 1×10⁻¹⁰ M, about 1×10⁻¹⁰ M to about 1×10⁻¹³ M, about 1×10⁻¹⁰ M to about 1×10⁻¹² M, about 1×10⁻¹⁰ M to about 1×10⁻¹¹ M, about 1×10⁻¹¹ M to about 1×10⁻¹³ M, about 1×10⁻¹¹ M to about 1×10⁻¹² M, or about 1×10⁻¹² M to about 1×10⁻¹³ M to CD32 (FcγRII). In embodiments, the Fc region of an IgG antibody described herein has a dissociation constant of about 1×10⁻⁵ M, about 1×10⁻⁶ M, about 1×10⁻⁷ M, about 1×10⁻⁸ M, about 1×10⁻⁹ M, about 1×10⁻¹⁰ M, about 1×10⁻¹¹ M, about 1×10⁻¹² M, or about 1×10⁻¹³ M to CD32 (FcγRII). In embodiments, the Fc region of an IgG antibody described herein has a dissociation constant of about 1×10⁻⁵ M to CD32 (FcγRII). In embodiments, the Fc region of an IgG antibody described herein has a dissociation constant of about 1×10⁻⁶ M to CD32 (FcγRII). In embodiments, the Fc region of an IgG antibody described herein has a dissociation constant of about 1×10⁻⁷ M to CD32 (FcγRII). In embodiments, the Fc region of an IgG antibody described herein has a dissociation constant of about 1×10⁻⁸ M to CD32 (FcγRII). In embodiments, the Fc region of an IgG antibody described herein has a dissociation constant of about 1×10⁻⁹ M to CD32 (FcγRII). In embodiments, the Fc region of an IgG antibody described herein has a dissociation constant of about 1×10⁻¹⁰ M to CD32 (FcγRII). In embodiments, the Fc region of an IgG antibody described herein has a dissociation constant of about 1×10⁻¹¹ M to CD32 (FcγRII). In embodiments, the Fc region of an IgG antibody described herein has a dissociation constant of about 1×10⁻¹² M to CD32 (FcγRII). In embodiments, the Fc region of an IgG antibody described herein has a dissociation constant of out 1×10⁻¹³ M to CD32 (FcγRII).

[0120] In embodiments of the recombinant proteins provided herein, the Fc region of the IgG antibody has a dissociation constant of about 1×10⁻⁵ M to about 1×10⁻¹³ M to CD16 (FcγRIII). In embodiments, the Fc region of the IgG antibody has a dissociation constant of about 1×10⁻⁵ M to about 1×10⁻¹³ M to CD16 (FcγRIII). In embodiments, the Fc region has a dissociation constant of about 1×10⁻⁵ M to about 1×10⁻¹² M, about 1×10⁻⁵ M to about 1×10⁻¹¹ M, about 1×10⁻⁵ M to about 1×10⁻¹⁰ M, about 1×10⁻⁵ M to about 1×10⁻⁹ M, about 1×10⁻⁵ M to about 1×10⁻⁸ M, about 1×10⁻⁵ M to about 1×10⁻⁷ M, about 1×10⁻⁵ M to about 1×10⁻⁶ M, about 1×10⁻⁶ M to about 1×10⁻¹³ M, about 1×10⁻⁶ M to about 1×10⁻¹² M, about 1×10⁻⁶ M to about 1×10⁻¹¹ M, about 1×10⁻⁶ M to about 1×10⁻¹⁰ M, about 1×10⁻⁶ M to about 1×10⁻⁹ M, about 1×10⁻⁶ M to about 1×10⁻⁸ M, about 1×10⁻⁶ M to about 1×10⁻⁷ M, about 1×10⁻⁷ M to about 1×10⁻¹³ M, about 1×10⁻⁷ M to about 1×10⁻¹² M, about 1×10⁻⁷ M to about 1×10⁻¹¹ M, about 1×10⁻⁷ M to about 1×10⁻¹⁰ M, about 1×10⁻⁷ M to about 1×10⁻⁹ M, about 1×10⁻⁷ M to about 1×10⁻⁸ M, about 1×10⁻⁸ M to about 1×10⁻¹³ M, about 1×10⁻⁸ M to about 1×10⁻¹² M, about 1×10⁻⁸ M to about 1×10⁻¹¹ M, about 1×10⁻⁸ M to about 1×10⁻¹⁰ M, about 1×10⁻⁸ M to about 1×10⁻⁹ M, about 1×10⁻⁹ M to about 1×10⁻¹³ M, about 1×10⁻⁹ M to about 1×10⁻¹² M, about 1×10⁻⁹ M to about 1×10⁻¹¹ M, about 1×10⁻⁹ M to about 1×10⁻¹⁰ M, about 1×10⁻¹⁰ M to about 1×10⁻¹³ M, about 1×10⁻¹⁰ M to about 1×10⁻¹² M, about 1×10⁻¹⁰ M to about 1×10⁻¹¹ M, about 1×10⁻¹¹ M to about 1×10⁻¹³ M, about 1×10⁻¹¹ M to about 1×10⁻¹² M, or about 1×10⁻¹² M to about 1×10⁻¹³ M to CD16 (FcγRIII). In embodiments, the Fc region of an IgG antibody described herein has a dissociation constant of about 1×10⁻⁵ M, about 1×10⁻⁶ M, about 1×10⁻⁷ M, about 1×10⁻⁸ M, about 1×10⁻⁹ M, about 1×10⁻¹⁰ M, about 1×10⁻¹¹ M, about 1×10⁻¹² M, or about 1×10⁻¹³ M to CD16 (FcγRIII). In embodiments, the Fc region of an IgG antibody described herein has a dissociation constant of about 1×10⁻⁵ M to CD16 (FcγRIII). In embodiments, the Fc region of an IgG antibody described herein has a dissociation constant of about 1×10⁻⁶ M to CD16 (FcγRIII). In embodiments, the Fc region of an IgG antibody described herein has a dissociation constant of about 1×10⁻⁷ M to CD16 (FcγRIII). In embodiments, the Fc region of an IgG antibody described herein has a dissociation constant of about 1×10⁻⁸ M to CD16 (FcγRIII). In embodiments, the Fc region of an IgG antibody described herein has a dissociation constant of about 1×10⁻⁹ M to CD16 (FcγRIII). In embodiments, the Fc region of an IgG antibody described herein has a dissociation constant of about 1×10⁻¹⁰ M to CD16 (FcγRIII). In embodiments, the Fc region of an IgG antibody described herein has a dissociation constant of about 1×10⁻¹¹ M to CD16 (FcγRIII). In embodiments, the Fc region of an IgG antibody described herein has a dissociation constant of about 1×10⁻¹² M to CD16 (FcγRIII). In embodiments, the Fc region of an IgG antibody described herein has a dissociation constant of about 1×10⁻¹³ M to CD16 (FcγRIII).

[0121] In embodiments of the recombinant proteins provided herein, the Fc region of the IgG antibody has a dissociation constant of about 1×10⁻⁵ M to about 1×10⁻¹³ M to CD64 (FcγRI). In embodiments, the Fc region of the IgG antibody has a dissociation constant of about 1×10⁻⁵ M to about 1×10⁻¹³ M to CD64 (FcγRI). In embodiments, the Fc region has a dissociation constant of about 1×10⁻⁵ M to about 1×10⁻¹² M, about 1×10⁻⁵ M to about 1×10⁻¹¹ M, about 1×10⁻⁵ M to about 1×10⁻¹⁰ M, about 1×10⁻⁵ M to about 1×10⁻⁹ M, about 1×10⁻⁵ M to about 1×10⁻⁸ M, about 1×10⁻⁵ M to about 1×10⁻⁷ M, about 1×10⁻⁵ M to about 1×10⁻⁶ M, about 1×10⁻⁶ M to about 1×10⁻¹³ M, about 1×10⁻⁶ M to about 1×10⁻¹² M, about 1×10⁻⁶ M to about 1×10⁻¹¹ M, about 1×10⁻⁶ M to about 1×10⁻¹⁰ M, about 1×10⁻⁶ M to about 1×10⁻⁹ M, about 1×10⁻⁶ M to about 1×10⁻⁸ M, about 1×10⁻⁶ M to about 1×10⁻⁷ M, about 1×10⁻⁷ M to about 1×10⁻¹³ M, about 1×10⁻⁷ M to about 1×10⁻¹² M, about 1×10⁻⁷ M to about 1×10⁻¹¹ M, about 1×10⁻⁷ M to about 1×10⁻¹⁰ M, about 1×10⁻⁷ M to about 1×10⁻⁹ M, about 1×10⁻⁷ M to about 1×10⁻⁸ M, about 1×10⁻⁸ M to about 1×10⁻¹³ M, about 1×10⁻⁸ M to about 1×10⁻¹² M, about 1×10⁻⁸ M to about 1×10⁻¹¹ M, about 1×10⁻⁸ M to about 1×10⁻¹⁰ M, about 1×10⁻⁸ M to about 1×10⁻⁹ M, about 1×10⁻⁹ M to about 1×10⁻¹³ M, about 1×10⁻⁹ M to about 1×10⁻¹² M, about 1×10⁻⁹ M to about 1×10⁻¹¹ M, about 1×10⁻⁹ M to about 1×10⁻¹⁰ M, about 1×10⁻¹⁰ M to about 1×10⁻¹³ M, about 1×10⁻¹⁰ M to about 1×10⁻¹² M, about 1×10⁻¹⁰ M to about 1×10⁻¹¹ M, about 1×10⁻¹¹ M to about 1×10⁻¹³ M, about 1×10⁻¹¹ M to about 1×10⁻¹² M, or about 1×10⁻¹² M to about 1×10⁻¹³ M to CD64 (FcγRI). In embodiments, the Fc region of an IgG antibody described herein has a dissociation constant of about 1×10⁻⁵ M, about 1×10⁻⁶ M, about 1×10⁻⁷ M, about 1×10⁻⁸ M, about 1×10⁻⁹ M, about 1×10⁻¹⁰ M, about 1×10⁻¹¹ M, about 1×10⁻¹² M, or about 1×10⁻¹³ M to CD64 (FcγRI). In embodiments, the Fc region of an IgG antibody described herein has a dissociation constant of about 1×10⁻⁵ M to CD64 (FcγRI) In embodiments, the Fc region of an IgG antibody described herein has a dissociation constant of about 1×10⁻⁶ M to CD64 (FcγRI). In embodiments, the Fc region of an IgG antibody described herein has a dissociation constant of about 1×10⁻⁷ M to CD64 (FcγRI). In embodiments, the Fc region of an IgG antibody described herein has a dissociation constant of about 1×10⁻⁸ M to CD64 (FcγRI). In embodiments, the Fc region of an IgG antibody described herein has a dissociation constant of about 1×10⁻⁹ M to CD64 (FcγRI). In embodiments, the Fc region of an IgG antibody described herein has a dissociation constant of about 1×10⁻¹⁰ M to CD64 (FcγRI). In embodiments, the Fc region of an IgG antibody described herein has a dissociation constant of about 1×10⁻¹¹ M to CD64 (FcγRI). In embodiments, the Fc region of an IgG antibody described herein has a dissociation constant of about 1×10⁻¹² M to CD64 (FcγRI). In embodiments, the Fc region of an IgG antibody described herein has a dissociation constant of about 1×10⁻¹³ M to CD64 (FcγRI).

[0122] In embodiments, the IgG antibody includes a protease resistant sequence resistant to cleavage by a protease. In embodiments, the protease is an IgG specific protease. In embodiments, the IgG specific protease is selected from IdeS and IdeZ. In embodiments, the IgG antibody includes a protease resistant sequence resistant to cleavage by IdeS protease. In embodiments, the IgG antibody includes a protease resistant sequence resistant to cleavage by IdeZ protease.

[0123] In embodiments of the recombinant proteins provided herein, the IgG antibody includes a protease resistant sequence resistant to cleavage by a protease specific for an ELLGGPS amino acid sequence (SEQ ID NO: 544). In embodiments, the ELLGGPS amino acid sequence specific protease, includes but is not limited to, pepsin, matrix metalloproteinase 7 (MMP7), matrix metalloproteinase 3 (MMP3), matrix metalloproteinase (MMP12), cathepsin G, and glutamyl endopeptidase V8 (GluV8). In embodiments, the IgG antibody includes a protease resistant sequence resistant to cleavage by pepsin. In embodiments, the IgG antibody includes a protease resistant sequence resistant to cleavage by matrix metalloproteinase 7 (MMP7). In embodiments, the IgG antibody includes a protease resistant sequence resistant to cleavage by matrix metalloproteinase 3 (MMP3). In embodiments, the IgG antibody includes a protease resistant sequence resistant to cleavage by matrix metalloproteinase (MMP12). In embodiments, the IgG antibody includes a protease resistant sequence resistant to cleavage by cathepsin G. In embodiments, the IgG antibody includes a protease resistant sequence resistant to cleavage by glutamyl endopeptidase V8 (GluV8).

[0124] In an aspect, provided herein are recombinant proteins including a Type I transmembrane domain, an immunoglobulin G (IgG) antibody, where the transmembrane domain is fused to the C-terminus of the IgG antibody and where the recombinant protein includes an Fc region with a dissociation constant of about 1×10⁻⁵ M to about 1×10⁻¹³ M to one or more of CD32 (FcγRII), CD16 (FcγRIII), and CD64 (FcγRI).

[0125] In embodiments, the Type I transmembrane domain is capable of dimerization. In embodiments, the Type I transmembrane domain is selected from an EGFR, PDGFR-alpha, PDGFR-beta, HER2, HER3, HER4, FGFR1, FGFR2, FGFR3, FGFR4, VEGFR1, VEGFR2, VEGFR3, Trk-A, Trk-B, Trk-C, and insulin receptor transmembrane domain. In embodiments, the Type I transmembrane domain is an EGFR transmembrane domain. In embodiments, the Type I transmembrane domain is a PDGFR-alpha transmembrane domain. In embodiments, the Type I transmembrane domain is a PDGFR-beta transmembrane domain. In embodiments, the Type I transmembrane domain is an HER2 transmembrane domain. In embodiments, the Type I transmembrane domain is an HER3 transmembrane domain. In embodiments, the Type I transmembrane domain is an HER4 transmembrane domain. In embodiments, the Type I transmembrane domain is an FGFR1 transmembrane domain. In embodiments, the Type I transmembrane domain is an FGFR2 transmembrane domain. In embodiments, the Type I transmembrane domain is an FGFR3 transmembrane domain. In embodiments, the Type I transmembrane domain is an FGFR4 transmembrane domain. In embodiments, the Type I transmembrane domain is a VEGFR1 transmembrane domain. In embodiments, the Type I transmembrane domain is a VEGFR2 transmembrane domain. In embodiments, the Type I transmembrane domain is a VEGFR3 transmembrane domain. In embodiments, the Type I transmembrane domain is a Trk-A transmembrane domain. In embodiments, the Type I transmembrane domain is a Trk-B transmembrane domain. In embodiments, the Type I transmembrane domain is a Trk-C transmembrane domain. In embodiments, the Type I transmembrane domain is an insulin receptor transmembrane domain.

[0126] In embodiments, the recombinant protein includes an IgG antibody selected from IgG1, IgG2, IgG3, and IgG4. In embodiments, the IgG antibody is IgG1 antibody. In embodiments, the IgG antibody is IgG2 antibody. In embodiments, the IgG antibody is IgG3 antibody. In embodiments, the IgG antibody is IgG4 antibody.

[0127] In embodiments of the recombinant proteins provided herein, the IgG antibody includes an Fc (fragment crystallizable) region, a Fab (antigen-binding fragment) region, and a hinge region. In embodiments, the IgG antibody includes an Fc (fragment crystallizable) region. In embodiments, the IgG antibody includes a Fab (garment crystallizable) region. In embodiments, the IgG antibody includes an Fc (antigen-binding fragment) region. In embodiments, the recombinant protein wherein the IgG antibody includes a hinge region.

[0128] In embodiments of the recombinant proteins provided herein, the Fc region of an IgG antibody described herein has a dissociation constant of about 1×10⁻⁵ M to about 1×10⁻¹³ M to one or more of CD32 (FcγRII), CD16 (FcγRIII), and CD64 (FcγRI). In embodiments, the Fc region has a dissociation constant of about 1×10⁻⁵ M to about 1×10⁻¹² M, about 1×10⁻⁵ M to about 1×10⁻¹¹ M, about 1×10⁻⁵ M to about 1×10⁻¹⁰ M, about 1×10⁻⁵ M to about 1×10⁻⁹ M, about 1×10⁻⁵ M to about 1×10⁻⁸ M, about 1×10⁻⁵ M to about 1×10⁻⁷ M, about 1×10⁻⁵ M to about 1×10⁻⁶ M, about 1×10⁻⁶ M to about 1×10⁻¹³ M, about 1×10⁻⁶ M to about 1×10⁻¹² M, about 1×10⁻⁶ M to about 1×10⁻¹¹ M, about 1×10⁻⁶ M to about 1×10⁻¹⁰ M, about 1×10⁻⁶ M to about 1×10⁻⁹ M, about 1×10⁻⁶ M to about 1×10⁻⁸ M, about 1×10⁻⁶ M to about 1×10⁻⁷ M, about 1×10⁻⁷ M to about 1×10⁻¹³ M, about 1×10⁻⁷ M to about 1×10⁻¹² M, about 1×10⁻⁷ M to about 1×10⁻¹¹ M, about 1×10⁻⁷ M to about 1×10⁻¹⁰ M, about 1×10⁻⁷ M to about 1×10⁻⁹ M, about 1×10⁻⁷ M to about 1×10⁻⁸ M, about 1×10⁻⁸ M to about 1×10⁻¹³ M, about 1×10⁻⁸ M to about 1×10⁻¹² M, about 1×10⁻⁸ M to about 1×10⁻¹¹ M, about 1×10⁻⁸ M to about 1×10⁻¹⁰ M, about 1×10⁻⁸ M to about 1×10⁻⁹ M, about 1×10⁻⁹ M to about 1×10⁻¹³ M, about 1×10⁻⁹ M to about 1×10⁻¹² M, about 1×10⁻⁹ M to about 1×10⁻¹¹ M, about 1×10⁻⁹ M to about 1×10⁻¹⁰ M, about 1×10⁻¹⁰ M to about 1×10⁻¹³ M, about 1×10⁻¹⁰ M to about 1×10⁻¹² M, about 1×10⁻¹⁰ M to about 1×10⁻¹¹ M, about 1×10⁻¹¹ M to about 1×10⁻¹³ M, about 1×10⁻¹¹ M to about 1×10⁻¹² M, or about 1×10⁻¹² M to about 1×10⁻¹³ M to one or more of CD32 (FcγRII), CD16 (FcγRIII), and CD64 (FcγRI). In embodiments, the Fc region of an IgG antibody described herein has a dissociation constant of about 1×10⁻⁵ M, about 1×10⁻⁶ M, about 1×10⁻⁷ M, about 1×10⁻⁸ M, about 1×10⁻⁹ M, about 1×10⁻¹⁰ M, about 1×10⁻¹¹ M, about 1×10⁻¹² M, or about 1×10⁻¹³ M to one or more of CD32 (FcγRII), CD16 (FcγRIII), and CD64 (FcγRI).

[0129] In embodiments of the recombinant proteins provided herein, the Fc region of the IgG antibody has a dissociation constant of about 1×10⁻⁵ M to about 1×10⁻¹³ M to CD32 (FcγRII). In embodiments, the Fc region has a dissociation constant of about 1×10⁻⁵ M to about 1×10⁻¹² M, about 1×10⁻⁵ M to about 1×10⁻¹¹ M, about 1×10⁻⁵ M to about 1×10⁻¹⁰ M, about 1×10⁻⁵ M to about 1×10⁻⁹ M, about 1×10⁻⁵ M to about 1×10⁻⁸ M, about 1×10⁻⁵ M to about 1×10⁻⁷ M, about 1×10⁻⁵ M to about 1×10⁻⁶ M, about 1×10⁻⁶ M to about 1×10⁻¹³ M, about 1×10⁻⁶ M to about 1×10⁻¹² M, about 1×10⁻⁶ M to about 1×10⁻¹¹ M, about 1×10⁻⁶ M to about 1×10⁻¹⁰ M, about 1×10⁻⁶ M to about 1×10⁻⁹ M, about 1×10⁻⁶ M to about 1×10⁻⁸ M, about 1×10⁻⁶ M to about 1×10⁻⁷ M, about 1×10⁻⁷ M to about 1×10⁻¹³ M, about 1×10⁻⁷ M to about 1×10⁻¹² M, about 1×10⁻⁷ M to about 1×10⁻¹¹ M, about 1×10⁻⁷ M to about 1×10⁻¹⁰ M, about 1×10⁻⁷ M to about 1×10⁻⁹ M, about 1×10⁻⁷ M to about 1×10⁻⁸ M, about 1×10⁻⁸ M to about 1×10⁻¹³ M, about 1×10⁻⁸ M to about 1×10⁻¹² M, about 1×10⁻⁸ M to about 1×10⁻¹¹ M, about 1×10⁻⁸ M to about 1×10⁻¹⁰ M, about 1×10⁻⁸ M to about 1×10⁻⁹ M, about 1×10⁻⁹ M to about 1×10⁻¹³ M, about 1×10⁻⁹ M to about 1×10⁻¹² M, about 1×10⁻⁹ M to about 1×10⁻¹¹ M, about 1×10⁻⁹ M to about 1×10⁻¹⁰ M, about 1×10⁻¹⁰ M to about 1×10⁻¹³ M, about 1×10⁻¹⁰ M to about 1×10⁻¹² M, about 1×10⁻¹⁰ M to about 1×10⁻¹¹ M, about 1×10⁻¹¹ M to about 1×10⁻¹³ M, about 1×10⁻¹¹ M to about 1×10⁻¹² M, or about 1×10⁻¹² M to about 1×10⁻¹³ M to CD32 (FcγRII). In embodiments, the Fc region of an IgG antibody described herein has a dissociation constant of about 1×10⁻⁵ M, about 1×10⁻⁶ M, about 1×10⁻⁷ M, about 1×10⁻⁸ M, about 1×10⁻⁹ M, about 1×10⁻¹⁰ M, about 1×10⁻¹¹ M, about 1×10⁻¹² M, or about 1×10⁻¹³ M to CD32 (FcγRII). In embodiments, the Fc region of an IgG antibody described herein has a dissociation constant of about 1×10⁻⁵ M to CD32 (FcγRII). In embodiments, the Fc region of an IgG antibody described herein has a dissociation constant of about 1×10⁻⁶ M to CD32 (FcγRII). In embodiments, the Fc region of an IgG antibody described herein has a dissociation constant of about 1×10⁻⁷ M to CD32 (FcγRII). In embodiments, the Fc region of an IgG antibody described herein has a dissociation constant of about 1×10⁻⁸ M to CD32 (FcγRII). In embodiments, the Fc region of an IgG antibody described herein has a dissociation constant of about 1×10⁻⁹ M to CD32 (FcγRII). In embodiments, the Fc region of an IgG antibody described herein has a dissociation constant of about 1×10⁻¹⁰ M to CD32 (FcγRII). In embodiments, the Fc region of an IgG antibody described herein has a dissociation constant of about 1×10⁻¹¹ M to CD32 (FcγRII). In embodiments, the Fc region of an IgG antibody described herein has a dissociation constant of about 1×10⁻¹² M to CD32 (FcγRII). In embodiments, the Fc region of an IgG antibody described herein has a dissociation constant of about 1×10⁻¹³ M to CD32 (FcγRII).

[0130] In embodiments of the recombinant proteins provided herein, the Fc region of the IgG antibody has a dissociation constant of about 1×10⁻⁵ M to about 1×10⁻¹³ M to CD16 (FcγRIII). In embodiments, the Fc region of the IgG antibody has a dissociation constant of about 1×10⁻⁵ M to about 1×10⁻¹³ M to CD16 (FcγRIII). In embodiments, the Fc region has a dissociation constant of about 1×10⁻⁵ M to about 1×10⁻¹² M, about 1×10⁻⁵ M to about 1×10⁻¹¹ M, about 1×10⁻⁵ M to about 1×10⁻¹⁰ M, about 1×10⁻⁵ M to about 1×10⁻⁹ M, about 1×10⁻⁵ M to about 1×10⁻⁸ M, about 1×10⁻⁵ M to about 1×10⁻⁷ M, about 1×10⁻⁵ M to about 1×10⁻⁶ M, about 1×10⁻⁶ M to about 1×10⁻¹³ M, about 1×10⁻⁶ M to about 1×10⁻¹² M, about 1×10⁻⁶ M to about 1×10⁻¹¹ M, about 1×10⁻⁶ M to about 1×10⁻¹⁰ M, about 1×10⁻⁶ M to about 1×10⁻⁹ M, about 1×10⁻⁶ M to about 1×10⁻⁸ M, about 1×10⁻⁶ M to about 1×10⁻⁷ M, about 1×10⁻⁷ M to about 1×10⁻¹³ M, about 1×10⁻⁷ M to about 1×10⁻¹² M, about 1×10⁻⁷ M to about 1×10⁻¹¹ M, about 1×10⁻⁷ M to about 1×10⁻¹⁰ M, about 1×10⁻⁷ M to about 1×10⁻⁹ M, about 1×10⁻⁷ M to about 1×10⁻⁸ M, about 1×10⁻⁸ M to about 1×10⁻¹³ M, about 1×10⁻⁸ M to about 1×10⁻¹² M, about 1×10⁻⁸ M to about 1×10⁻¹¹ M, about 1×10⁻⁸ M to about 1×10⁻¹⁰ M, about 1×10⁻⁸ M to about 1×10⁻⁹ M, about 1×10⁻⁹ M to about 1×10⁻¹³ M, about 1×10⁻⁹ M to about 1×10⁻¹² M, about 1×10⁻⁹ M to about 1×10⁻¹¹ M, about 1×10⁻⁹ M to about 1×10⁻¹⁰ M, about 1×10⁻¹⁰ M to about 1×10⁻¹³ M, about 1×10⁻¹⁰ M to about 1×10⁻¹² M, about 1×10⁻¹⁰ M to about 1×10⁻¹¹ M, about 1×10⁻¹¹ M to about 1×10⁻¹³ M, about 1×10⁻¹¹ M to about 1×10⁻¹² M, or about 1×10⁻¹² M to about 1×10⁻¹³ M to CD16 (FcγRIII). In embodiments, the Fc region of an IgG antibody described herein has a dissociation constant of about 1×10⁻⁵ M, about 1×10⁻⁶ M, about 1×10⁻⁷ M, about 1×10⁻⁸ M, about 1×10⁻⁹ M, about 1×10⁻¹⁰ M, about 1×10⁻¹¹ M, about 1×10⁻¹² M, or about 1×10⁻¹³ M to CD16 (FcγRIII). In embodiments, the Fc region of an IgG antibody described herein has a dissociation constant of about 1×10⁻⁵ M to CD16 (FcγRIII). In embodiments, the Fc region of an IgG antibody described herein has a dissociation constant of about 1×10⁻⁶ M to CD16 (FcγRIII). In embodiments, the Fc region of an IgG antibody described herein has a dissociation constant of about 1×10⁻⁷ M to CD16 (FcγRIII). In embodiments, the Fc region of an IgG antibody described herein has a dissociation constant of about 1×10⁻⁸ M to CD16 (FcγRIII). In embodiments, the Fc region of an IgG antibody described herein has a dissociation constant of about 1×10⁻⁹ M to CD16 (FcγRIII). In embodiments, the Fc region of an IgG antibody described herein has a dissociation constant of about 1×10⁻¹⁰ M to CD16 (FcγRIII). In embodiments, the Fc region of an IgG antibody described herein has a dissociation constant of about 1×10⁻¹¹ M to CD16 (FcγRIII). In embodiments, the Fc region of an IgG antibody described herein has a dissociation constant of about 1×10⁻¹² M to CD16 (FcγRIII). In embodiments, the Fc region of an IgG antibody described herein has a dissociation constant of about 1×10⁻¹³ M to CD16 (FcγRIII).

[0131] In embodiments of the recombinant proteins provided herein, the Fc region of the IgG antibody has a dissociation constant of about 1×10⁻⁵ M to about 1×10⁻¹³ M to CD64 (FcγRI). In embodiments, the Fc region of the IgG antibody has a dissociation constant of about 1×10⁻⁵ M to about 1×10⁻¹³ M to CD64 (FcγRI). In embodiments, the Fc region has a dissociation constant of about 1×10⁻⁵ M to about 1×10⁻¹² M, about 1×10⁻⁵ M to about 1×10⁻¹¹ M, about 1×10⁻⁵ M to about 1×10⁻¹⁰ M, about 1×10⁻⁵ M to about 1×10⁻⁹ M, about 1×10⁻⁵ M to about 1×10⁻⁸ M, about 1×10⁻⁵ M to about 1×10⁻⁷ M, about 1×10⁻⁵ M to about 1×10⁻⁶ M, about 1×10⁻⁶ M to about 1×10⁻¹³ M, about 1×10⁻⁶ M to about 1×10⁻¹² M, about 1×10⁻⁶ M to about 1×10⁻¹¹ M, about 1×10⁻⁶ M to about 1×10⁻¹⁰ M, about 1×10⁻⁶ M to about 1×10⁻⁹ M, about 1×10⁻⁶ M to about 1×10⁻⁸ M, about 1×10⁻⁶ M to about 1×10⁻⁷ M, about 1×10⁻⁷ M to about 1×10⁻¹³ M, about 1×10⁻⁷ M to about 1×10⁻¹² M, about 1×10⁻⁷ M to about 1×10⁻¹¹ M, about 1×10⁻⁷ M to about 1×10⁻¹⁰ M, about 1×10⁻⁷ M to about 1×10⁻⁹ M, about 1×10⁻⁷ M to about 1×10⁻⁸ M, about 1×10⁻⁸ M to about 1×10⁻¹³ M, about 1×10⁻⁸ M to about 1×10⁻¹² M, about 1×10⁻⁸ M to about 1×10⁻¹¹ M, about 1×10⁻⁸ M to about 1×10⁻¹⁰ M, about 1×10⁻⁸ M to about 1×10⁻⁹ M, about 1×10⁻⁹ M to about 1×10⁻¹³ M, about 1×10⁻⁹ M to about 1×10⁻¹² M, about 1×10⁻⁹ M to about 1×10⁻¹¹ M, about 1×10⁻⁹ M to about 1×10⁻¹⁰ M, about 1×10⁻¹⁰ M to about 1×10⁻¹³ M, about 1×10⁻¹⁰ M to about 1×10⁻¹² M, about 1×10⁻¹⁰ M to about 1×10⁻¹¹ M, about 1×10⁻¹¹ M to about 1×10⁻¹³ M, about 1×10⁻¹¹ M to about 1×10⁻¹² M, or about 1×10⁻¹² M to about 1×10⁻¹³ M to CD64 (FcγRI). In embodiments, the Fc region of an IgG antibody described herein has a dissociation constant of about 1×10⁻⁵ M, about 1×10⁻⁶ M, about 1×10⁻⁷ M, about 1×10⁻⁸ M, about 1×10⁻⁹ M, about 1×10⁻¹⁰ M, about 1×10⁻¹¹ M, about 1×10⁻¹² M, or about 1×10⁻¹³ M to CD64 (FcγRI). In embodiments, the Fc region of an IgG antibody described herein has a dissociation constant of about 1×10⁻⁵ M to CD64 (FcγRI). In embodiments, the Fc region of an IgG antibody described herein has a dissociation constant of about 1×10⁻⁶ M to CD64 (FcγRI). In embodiments, the Fc region of an IgG antibody described herein has a dissociation constant of about 1×10⁻⁷ M to CD64 (FcγRI). In embodiments, the Fc region of an IgG antibody described herein has a dissociation constant of about 1×10⁻⁸ M to CD64 (FcγRI). In embodiments, the Fc region of an IgG antibody described herein has a dissociation constant of about 1×10⁻⁹ M to CD64 (FcγRI). In embodiments, the Fc region of an IgG antibody described herein has a dissociation constant of about 1×10⁻¹⁰ M to CD64 (FcγRI). In embodiments, the Fc region of an IgG antibody described herein has a dissociation constant of about 1×10⁻¹¹ M to CD64 (FcγRI). In embodiments, the Fc region of an IgG antibody described herein has a dissociation constant of about 1×10⁻¹² M to CD64 (FcγRI). In embodiments, the Fc region of an IgG antibody described herein has a dissociation constant of about 1×10⁻¹³ M to CD64 (FcγRI).

[0132] In embodiments of the recombinant proteins provided herein, the hinge region includes a protease resistant sequence. In embodiments, the sequence is between amino acid positions 246-252 according to Kabat numbering. In embodiments, the sequence is between positions corresponding to Kabat positions 246-252. In embodiments, the protease resistant sequence is two or more amino acids in length. In embodiments, the protease resistant sequence is three amino acids in length. In embodiments, the protease resistant sequence is four amino acids in length. In embodiments, the protease resistant sequence is five amino acids in length. In embodiments, the protease resistant sequence is six amino acids in length. In embodiments, the protease resistant sequence is seven amino acids in length. In embodiments, the protease resistant sequence includes the amino acids of SEQ ID NO: 546. In embodiments, the protease resistant sequence includes the amino acids of SEQ ID NO: 545. In embodiments, the protease resistant sequence includes the amino acids of SEQ ID NO: 547.

[0133] In embodiments, the IgG antibody includes a protease resistant sequence resistant to cleavage by a protease. In embodiments, the protease is an IgG specific protease. In embodiments, the IgG specific protease is selected from IdeS and IdeZ. In embodiments, the IgG antibody includes a protease resistant sequence resistant to cleavage by IdeS protease. In embodiments, the IgG antibody includes a protease resistant sequence resistant to cleavage by IdeZ protease.

[0134] In embodiments, the IgG antibody hinge region is two amino acids in length and includes an amino acid sequence of DW, YD, QW, QE, PW, QD, or DD. In embodiments, the IgG antibody hinge region is three amino acids in length and includes an amino acid sequence of XDW, XDW, XYD, XQW, XQE, XPW, XQD, or XDD, where X is any amino acid. In embodiments, the IgG antibody hinge region is four amino acids in length and includes an amino acid sequence of XXDW, XXDW, XXYD, XXQW, XXQE, XXPW, XXQD, or XXDD, where X is any amino acid. In embodiments, the IgG antibody hinge region is five amino acids in length and includes an amino acid sequence of XXXDW, XXXYD, XXXQW, XXXQE, XXXPW, XXXQD, or XXXDD, where X is any amino acid. In embodiments, the IgG antibody hinge region is six amino acids in length and includes an amino acid sequence of XXXXDW, XXXXYD, XXXXQW, XXXXQE, XXXXPW, XXXXQD, or XXXXDD, where X is any amino acid. In embodiments, the IgG antibody hinge region is seven amino acids in length and includes an amino acid sequence of XXXXXDW, XXXXXYD, XXXXXQW, XXXXXQE, XXXXXPW, XXXXXQD, or XXXXXDD, where X is any amino acid. In embodiments, the IgG antibody hinge region is eight amino acids in length and includes an amino acid sequence of XXXXXXDW, XXXXXXYD, XXXXXXQW, XXXXXXQE, XXXXXXPW, XXXXXXQD, or XXXXXXDD, where X is any amino acid. In embodiments, the IgG antibody hinge region is nine amino acids in length and includes an amino acid sequence of XXXXXXXDW, XXXXXXXYD, XXXXXXXQW, XXXXXXXQE, XXXXXXXPW, XXXXXXXQD, or XXXXXXXDD, where X is any amino acid. In embodiments, the IgG antibody hinge region includes an amino acid sequence of XCWDW, XXCWDW, XXXCWDW, XXXXXCWDW, XXXXXCWDW, XXXXXXCWDW, XXXXXXXCWDW, ETCWDW, DSCWDW, YDCWDW, DDCWDW, DMCWDW, EHCWDW, IICWDW, DVCWDW, EFCWDW, FNCWDW, EETCWDW, EDSCWDW, EETCWDD, or EETQWDD where X is any amino acid.

[0135] In embodiments, the IgG antibody hinge region includes DW, YD, QW, QE, PW, QD, DD, CWDW, ETCWDW, DSCWDW, YDCWDW, DDCWDW, DMCWDW, EHCWDW, IICWDW, DVCWDW, EFCWDW, FNCWDW, EETCWDW (SEQ ID NO: 545), EDSCWDW (SEQ ID NO: 547), EETCWDD, EETCWSW (SEQ ID NO: 547), EETQWDD. In some aspects, the variants or homologs have one, two, three four, five or six amino acid sequence identity.

[0136] In embodiments, the IgG antibody includes a Fab region that is identical to the Fab region of any one of Abciximab, Adalimumab, Alemtuzumab, Alemtuzumab, Alirocumab, Arcitumomab, Atezolizumab, Avelumab, Basiliximab, Belimumab, Besilesomab, Bevacizumab, Bevacizumab, Bezlotoxumab, Brentuximab, Brodalumab, Canakinumab, Capromab, Catumaxomab, Certolizumab pegol, Cetuximab, Daratumumab, Denosumab, Dinutuximab, Dupilumab, Durvalumab, Eculizumab, Efalizumab, Elotuzumab, Fanolesomab, Gemtuzumab ozogamicin, Golimumab, Ibritumomab tiuxetan, Idarucizumab, Imiciromab, Infliximab, Ipilimumab, Mepolizumab, Muromonab-CD3, Natalizumab, Necitumumab, Nivolumab, Nofetumomab, Obiltoxaximab, Obinutuzumab, Ocrelizumab, Ofatumumab, Olaratumab, Omalizumab, Palivizumab, Panitumumab, Pembrolizumab, Pertuzumab, Ramucirumab, Ranibizumab, Raxibacumab, Reslizumab, Rituximab, Satumomab, Secukinumab, Siltuximab, Sulesomab, Tocilizumab, Tositumomab, Trastuzumab, Trastuzumab emtansine, Ustekinumab, Vedolizumab, Volocumab, and Votumumab. In embodiments, the IgG antibody includes a Fab region that is identical to the Fab region of Abciximab. In embodiments, the IgG antibody includes a Fab region that is identical to the Fab region of Adalimumab. In embodiments, the IgG antibody includes a Fab region that is identical to the Fab region of Alemtuzumab. In embodiments, the IgG antibody includes a Fab region that is identical to the Fab region of Alemtuzumab. In embodiments, the IgG antibody includes a Fab region that is identical to the Fab region of Alirocumab. In embodiments, the IgG antibody includes a Fab region that is identical to the Fab region of Arcitumomab. In embodiments, the IgG antibody includes a Fab region that is identical to the Fab region of Atezolizumab. In embodiments, the IgG antibody includes a Fab region that is identical to the Fab region of Avelumab. In embodiments, the IgG antibody includes a Fab region that is identical to the Fab region of Basiliximab. In embodiments, the IgG antibody includes a Fab region that is identical to the Fab region of Belimumab. In embodiments, the IgG antibody includes a Fab region that is identical to the Fab region of Besilesomab. In embodiments, the IgG antibody includes a Fab region that is identical to the Fab region of Bevacizumab. In embodiments, the IgG antibody includes a Fab region that is identical to the Fab region of Bezlotoxumab. In embodiments, the IgG antibody includes a Fab region that is identical to the Fab region of Brentuximab. In embodiments, the IgG antibody includes a Fab region that is identical to the Fab region of Brodalumab. In embodiments, the IgG antibody includes a Fab region that is identical to the Fab region of Canakinumab. In embodiments, the IgG antibody includes a Fab region that is identical to the Fab region of Capromab. In embodiments, the IgG antibody includes a Fab region that is identical to the Fab region of Catumaxomab. In embodiments, the IgG antibody includes a Fab region that is identical to the Fab region of Certolizumab pegol. In embodiments, the IgG antibody includes a Fab region that is identical to the Fab region of Cetuximab. In embodiments, the IgG antibody includes a Fab region that is identical to the Fab region of Daratumumab. In embodiments, the IgG antibody includes a Fab region that is identical to the Fab region of Denosumab. In embodiments, the IgG antibody includes a Fab region that is identical to the Fab region of Dinutuximab. In embodiments, the IgG antibody includes a Fab region that is identical to the Fab region of Dupilumab. In embodiments, the IgG antibody includes a Fab region that is identical to the Fab region of Durvalumab. In embodiments, the IgG antibody includes a Fab region that is identical to the Fab region of Eculizumab. In embodiments, the IgG antibody includes a Fab region that is identical to the Fab region of Efalizumab. In embodiments, the IgG antibody includes a Fab region that is identical to the Fab region of Elotuzumab. In embodiments, the IgG antibody includes a Fab region that is identical to the Fab region of Fanolesomab. In embodiments, the IgG antibody includes a Fab region that is identical to the Fab region of Gemtuzumab ozogamicin. In embodiments, the IgG antibody includes a Fab region that is identical to the Fab region of Golimumab. In embodiments, the IgG antibody includes a Fab region that is identical to the Fab region of Ibritumomab tiuxetan. In embodiments, the IgG antibody includes a Fab region that is identical to the Fab region of Idarucizumab. In embodiments, the IgG antibody includes a Fab region that is identical to the Fab region of Imiciromab. In embodiments, the IgG antibody includes a Fab region that is identical to the Fab region of Infliximab. In embodiments, the IgG antibody includes a Fab region that is identical to the Fab region of Ipilimumab. In embodiments, the IgG antibody includes a Fab region that is identical to the Fab region of Mepolizumab. In embodiments, the IgG antibody includes a Fab region that is identical to the Fab region of Muromonab-CD3. In embodiments, the IgG antibody includes a Fab region that is identical to the Fab region of Natalizumab. In embodiments, the IgG antibody includes a Fab region that is identical to the Fab region of Necitumumab. In embodiments, the IgG antibody includes a Fab region that is identical to the Fab region of Nivolumab. In embodiments, the IgG antibody includes a Fab region that is identical to the Fab region of Nofetumomab. In embodiments, the IgG antibody includes a Fab region that is identical to the Fab region of Obiltoxaximab. In embodiments, the IgG antibody includes a Fab region that is identical to the Fab region of Obinutuzumab. In embodiments, the IgG antibody includes a Fab region that is identical to the Fab region of Ocrelizumab. In embodiments, the IgG antibody includes a Fab region that is identical to the Fab region of Ofatumumab. In embodiments, the IgG antibody includes a Fab region that is identical to the Fab region of Olaratumab. In embodiments, the IgG antibody includes a Fab region that is identical to the Fab region of Omalizumab. In embodiments, the IgG antibody includes a Fab region that is identical to the Fab region of Palivizumab. In embodiments, the IgG antibody includes a Fab region that is identical to the Fab region of Panitumumab. In embodiments, the IgG antibody includes a Fab region that is identical to the Fab region of Pembrolizumab. In embodiments, the IgG antibody includes a Fab region that is identical to the Fab region of Pertuzumab. In embodiments, the IgG antibody includes a Fab region that is identical to the Fab region of Ramucirumab. In embodiments, the IgG antibody includes a Fab region that is identical to the Fab region of Ranibizumab. In embodiments, the IgG antibody includes a Fab region that is identical to the Fab region of Raxibacumab. In embodiments, the IgG antibody includes a Fab region that is identical to the Fab region of Reslizumab. In embodiments, the IgG antibody includes a Fab region that is identical to the Fab region of Rituximab. In embodiments, the IgG antibody includes a Fab region that is identical to the Fab region of Satumomab. In embodiments, the IgG antibody includes a Fab region that is identical to the Fab region of Secukinumab. In embodiments, the IgG antibody includes a Fab region that is identical to the Fab region of Siltuximab. In embodiments, the IgG antibody includes a Fab region that is identical to the Fab region of Sulesomab. In embodiments, the IgG antibody includes a Fab region that is identical to the Fab region of Tocilizumab. In embodiments, the IgG antibody includes a Fab region that is identical to the Fab region of Tositumomab. In embodiments, the IgG antibody includes a Fab region that is identical to the Fab region of Trastuzumab. In embodiments, the IgG antibody includes a Fab region that is identical to the Fab region of Trastuzumab emtansine. In embodiments, the IgG antibody includes a Fab region that is identical to the Fab region of Ustekinumab. In embodiments, the IgG antibody includes a Fab region that is identical to the Fab region of Vedolizumab. In embodiments, the IgG antibody includes a Fab region that is identical to the Fab region of Volocumab. In embodiments, the IgG antibody includes a Fab region that is identical to the Fab region of Votumumab.

[0137] In embodiments of the recombinant proteins provided herein, the IgG antibody includes a protease resistant sequence resistant to cleavage by a protease specific for an ELLGGPS amino acid sequence (SEQ ID NO: 544). In embodiments, the ELLGGPS amino acid sequence specific protease, includes but is not limited to, pepsin, matrix metalloproteinase 7 (MMP7), matrix metalloproteinase 3 (MMP3), matrix metalloproteinase (MMP12), cathepsin G, and glutamyl endopeptidase V8 (GluV8). In embodiments, the IgG antibody includes a protease resistant sequence resistant to cleavage by pepsin. In embodiments, the IgG antibody includes a protease resistant sequence resistant to cleavage by matrix metalloproteinase 7 (MMP7). In embodiments, the IgG antibody includes a protease resistant sequence resistant to cleavage by matrix metalloproteinase 3 (MMP3). In embodiments, the IgG antibody includes a protease resistant sequence resistant to cleavage by matrix metalloproteinase (MMP12). In embodiments, the IgG antibody includes a protease resistant sequence resistant to cleavage by cathepsin G. In embodiments, the IgG antibody includes a protease resistant sequence resistant to cleavage by glutamyl endopeptidase V8 (GluV8).

### IV. Anti-CD20 Antibodies

[0138] In an aspect, provided herein is an anti-CD20 antibody including a complementarity determining region (CDR) as encoded by a nucleic acid sequence of any of one SEQ ID Nos: 551-588.

[0139] In embodiments, provided herein is an anti-CD20 antibody that binds CD20 or an antigen fragment thereof, where the antibody includes a complementarity determining region (CDR) and encoded by a nucleic acid sequence as set forth in FIG. 14 (also reproduced in Tables 1, 2, and 3). In embodiments, provided herein is an anti-CD20 antibody that binds CD20 or an antigen fragment thereof, where the antibody includes a complementarity determining region (CDR) with amino acid sequence as set forth in Tables 1, 2 or 3. In embodiments, provided herein is an anti-CD20 antibody that binds CD20 or an antigen fragment thereof, where the antibody includes a complementarity determining region (CDR) with amino an acid sequence of any one of SEQ ID Nos: 589-629 or 633-635. In embodiments, provided herein is an antibody that binds CD20 or an antigen fragment thereof, with higher binding affinity to CD20 compared to non-mutated Rituximab (a CD20 binding antibody). In embodiments, provided herein is an antibody that binds CD20 or an antigen fragment thereof, with higher binding affinity to CD20 and includes a protease resistant hinge region when compared to non-mutated Rituximab (a CD20 binding antibody). In embodiments, provided herein is an antibody that binds CD20 or an antigen fragment thereof, with higher binding affinity to CD20 and includes mutations in one or more of the heavy chain CDR1, heavy chain CDR2, heavy chain CDR3, light chain CDR1, light chain CDR2, and light chain CDR3 compared to non-mutated Rituximab (a CD20 binding antibody).

[0140] In embodiments, the anti-CD20 antibody includes a heavy chain CDR1 encoded by a nucleotide sequence of TATACCGGGGAAGCGGTATAAC (SEQ ID NO: 551). In embodiments, the anti-CD20 antibody further includes a heavy chain CDR2 encoded by a nucleotide sequence of ATTTATCCGGGCAACGGCGAT (SEQ ID NO: 549), and a heavy chain CDR3 encoded by nucleotide sequence of CGCAGCACCTATTATGGCGGCGATTGGTATTTTAAC (SEQ ID NO: 550). In embodiments, the anti-CD20 antibody further includes a light chain CDR1 encoded by a nucleotide sequence of GCGAGCAGCAGCGTGAGC (SEQ ID NO: 630), the light chain CDR2 is encoded by a nucleotide sequence of GGAAGCGGCACCAGC (SEQ ID NO: 631), and the light chain CDR3 is encoded by a nucleotide sequence of TGGACCAGCAACCCGCCG (SEQ ID NO: 632). In embodiments, this anti-CD20 antibody is referred to as P01A09 and is further described in the description of Table 1 below. In embodiments, the anti-CD20 antibody is encoded by a nucleic acid sequence that encodes the amino acid sequence of rituximab, except that the heavy chain CDR1 sequence is encoded by a nucleotide sequence of TATACCGGGGAAGCGGTATAAC (SEQ ID NO: 551).

[0141] In embodiments, the anti-CD20 antibody includes a heavy chain CDR1 amino acid sequence of YTGKRYN (SEQ ID NO: 592). In embodiments, the anti-CD20 antibody further includes a heavy chain CDR2 amino acid sequence of IYPGNGD (SEQ ID NO: 590) and a heavy chain CDR3 amino acid sequence of RSTYYGGDWYFN (SEQ ID NO: 591). In embodiments, the anti-CD20 antibody further includes the light chain CDR1 amino acid sequence of ASSSVS (SEQ ID NO: 633), the light chain CDR2 amino acid sequence of GSGTS (SEQ ID NO: 634), and the light chain CDR3 amino acid of WTSNPP (SEQ ID NO: 635). In embodiments, this anti-CD20 antibody is referred to as P01A09 and is further described in the description of Table 1 below. In embodiments, the anti-CD20 antibody has the amino acid sequence of rituximab, except that the heavy chain CDR1 amino acid sequence is YTGKRYN (SEQ ID NO: 592).

[0142] In embodiments, the anti-CD20 antibody includes a heavy chain CDR1 encoded by a nucleotide sequence of TATACCTGTTTTAGGTATAAC (SEQ ID NO: 552). In embodiments, the anti-CD20 antibody further includes a heavy chain CDR2 encoded by a nucleotide sequence of ATTTATCCGGGCAACGGCGAT (SEQ ID NO: 549), and a heavy chain CDR3 encoded by nucleotide sequence of CGCAGCACCTATTATGGCGGCGATTGGTATTTTAAC (SEQ ID NO: 550). In embodiments, the anti-CD20 antibody further includes a light chain CDR1 encoded by a nucleotide sequence of GCGAGCAGCAGCGTGAGC (SEQ ID NO: 630), the light chain CDR2 is encoded by a nucleotide sequence of GGAAGCGGCACCAGC (SEQ ID NO: 631), and the light chain CDR3 is encoded by a nucleotide sequence of TGGACCAGCAACCCGCCG (SEQ ID NO: 632). In embodiments, this anti-CD20 antibody is referred to as P01B01 and is further described in the description of Table 1 below. In embodiments, the anti-CD20 antibody is encoded by a nucleic acid sequence that encodes the amino acid sequence of rituximab, except that the heavy chain CDR1 sequence is encoded by a nucleotide sequence of TATACCTGTTTTAGGTATAAC (SEQ ID NO: 552).

[0143] In embodiments, the anti-CD20 antibody includes a heavy chain CDR1 amino acid sequence of YTCFRYN (SEQ ID NO: 593). In embodiments, the anti-CD20 antibody further includes a heavy chain CDR2 amino acid sequence of IYPGNGD (SEQ ID NO: 590) and a heavy chain CDR3 amino acid sequence of RSTYYGGDWYFN (SEQ ID NO: 591). In embodiments, the anti-CD20 antibody further includes the light chain CDR1 amino acid sequence of ASSSVS (SEQ ID NO: 633), the light chain CDR2 amino acid sequence of GSGTS (SEQ ID NO: 634), and the light chain CDR3 amino acid of WTSNPP (SEQ ID NO: 635). In embodiments, this anti-CD20 antibody is referred to as P01B01 and is further described in the description of Table 1 below. In embodiments, the anti-CD20 antibody has the amino acid sequence of rituximab, except that the heavy chain CDR1 amino acid sequence is YTCFRYN (SEQ ID NO: 593).

[0144] In embodiments, the anti-CD20 antibody includes a heavy chain CDR1 encoded by a nucleotide sequence of TATACCTTCACAATTCGTTTG (SEQ ID NO: 553). In embodiments, the anti-CD20 antibody further includes a heavy chain CDR2 encoded by a nucleotide sequence of ATTTATCCGGGCAACGGCGAT (SEQ ID NO: 549), and a heavy chain CDR3 encoded by nucleotide sequence of CGCAGCACCTATTATGGCGGCGATTGGTATTTTAAC (SEQ ID NO: 550). In embodiments, the anti-CD20 antibody further includes a light chain CDR1 encoded by a nucleotide sequence of GCGAGCAGCAGCGTGAGC (SEQ ID NO: 630), the light chain CDR2 is encoded by a nucleotide sequence of GGAAGCGGCACCAGC (SEQ ID NO: 631), and the light chain CDR3 is encoded by a nucleotide sequence of TGGACCAGCAACCCGCCG (SEQ ID NO: 632). In embodiments, this anti-CD20 antibody is referred to as P02C12 and is further described in the description of Table 1 below. In embodiments, the anti-CD20 antibody is encoded by a nucleic acid sequence that encodes the amino acid sequence of rituximab, except that the heavy chain CDR1 sequence is encoded by a nucleotide sequence of TATACCTTCACAATTCGTTTG (SEQ ID NO: 553).

[0145] In embodiments, the anti-CD20 antibody includes a heavy chain CDR1 amino acid sequence of YTFTIRL (SEQ ID NO: 594). In embodiments, the anti-CD20 antibody further includes a heavy chain CDR2 amino acid sequence of IYPGNGD (SEQ ID NO: 590) and a heavy chain CDR3 amino acid sequence of RSTYYGGDWYFN (SEQ ID NO: 591). In embodiments, the anti-CD20 antibody further includes the light chain CDR1 amino acid sequence of ASSSVS (SEQ ID NO: 633), the light chain CDR2 amino acid sequence of GSGTS (SEQ ID NO: 634), and the light chain CDR3 amino acid of WTSNPP (SEQ ID NO: 635). In embodiments, this anti-CD20 antibody is referred to as P02C12 and is further described in the description of Table 1 below. In embodiments, the anti-CD20 antibody has the amino acid sequence of rituximab, except that the heavy chain CDR1 amino acid sequence is YTFTIRL (SEQ ID NO: 594).

[0146] In embodiments, the anti-CD20 antibody includes a heavy chain CDR1 encoded by a nucleotide sequence of TATACCGGGCGTTTTTATAAC (SEQ ID NO: 554). In embodiments, the anti-CD20 antibody further includes a heavy chain CDR2 encoded by a nucleotide sequence of ATTTATCCGGGCAACGGCGAT (SEQ ID NO: 549), and a heavy chain CDR3 encoded by nucleotide sequence of CGCAGCACCTATTATGGCGGCGATTGGTATTTTAAC (SEQ ID NO: 550). In embodiments, the anti-CD20 antibody further includes a light chain CDR1 encoded by a nucleotide sequence of GCGAGCAGCAGCGTGAGC (SEQ ID NO: 630), the light chain CDR2 is encoded by a nucleotide sequence of GGAAGCGGCACCAGC (SEQ ID NO: 631), and the light chain CDR3 is encoded by a nucleotide sequence of TGGACCAGCAACCCGCCG (SEQ ID NO: 632). In embodiments, this anti-CD20 antibody is referred to as P02F01 and is further described in the description of Table 1 below. In embodiments, the anti-CD20 antibody is encoded by a nucleic acid sequence that encodes the amino acid sequence of rituximab, except that the heavy chain CDR1 sequence is encoded by a nucleotide sequence of TATACCGGGCGTTTTTATAAC (SEQ ID NO: 554).

[0147] In embodiments, the anti-CD20 antibody includes a heavy chain CDR1 amino acid sequence of YTGRFYN (SEQ ID NO: 595). In embodiments, the anti-CD20 antibody further includes a heavy chain CDR2 amino acid sequence of IYPGNGD (SEQ ID NO: 590) and a heavy chain CDR3 amino acid sequence of RSTYYGGDWYFN (SEQ ID NO: 591). In embodiments, the anti-CD20 antibody further includes the light chain CDR1 amino acid sequence of ASSSVS (SEQ ID NO: 633), the light chain CDR2 amino acid sequence of GSGTS (SEQ ID NO: 634), and the light chain CDR3 amino acid of WTSNPP (SEQ ID NO: 635). In embodiments, this anti-CD20 antibody is referred to as P02F01 and is further described in the description of Table 1 below. In embodiments, the anti-CD20 antibody has the amino acid sequence of rituximab, except that the heavy chain CDR1 amino acid sequence is YTGRFYN (SEQ ID NO: 595).

[0148] In embodiments, the anti-CD20 antibody includes a heavy chain CDR1 encoded by a nucleotide sequence of TATACCAGTTGGATGTATAAC (SEQ ID NO: 555). In embodiments, the anti-CD20 antibody further includes a heavy chain CDR2 encoded by a nucleotide sequence of ATTTATCCGGGCAACGGCGAT (SEQ ID NO: 549), and a heavy chain CDR3 encoded by nucleotide sequence of CGCAGCACCTATTATGGCGGCGATTGGTATTTTAAC (SEQ ID NO: 550). In embodiments, the anti-CD20 antibody further includes a light chain CDR1 encoded by a nucleotide sequence of GCGAGCAGCAGCGTGAGC (SEQ ID NO: 630), the light chain CDR2 is encoded by a nucleotide sequence of GGAAGCGGCACCAGC (SEQ ID NO: 631), and the light chain CDR3 is encoded by a nucleotide sequence of TGGACCAGCAACCCGCCG (SEQ ID NO: 632). In embodiments, this anti-CD20 antibody is referred to as P03A05 and is further described in the description of Table 1 below. In embodiments, the anti-CD20 antibody is encoded by a nucleic acid sequence that encodes the amino acid sequence of rituximab, except that the heavy chain CDR1 sequence is encoded by a nucleotide sequence of TATACCAGTTGGATGTATAAC (SEQ ID NO: 555).

[0149] In embodiments, the anti-CD20 antibody includes a heavy chain CDR1 amino acid sequence of YTSWMYN (SEQ ID NO: 596). In embodiments, the anti-CD20 antibody further includes a heavy chain CDR2 amino acid sequence of IYPGNGD (SEQ ID NO: 590) and a heavy chain CDR3 amino acid sequence of RSTYYGGDWYFN (SEQ ID NO: 591). In embodiments, the anti-CD20 antibody further includes the light chain CDR1 amino acid sequence of ASSSVS (SEQ ID NO: 633), the light chain CDR2 amino acid sequence of GSGTS (SEQ ID NO: 634), and the light chain CDR3 amino acid of WTSNPP (SEQ ID NO: 635). In embodiments, this anti-CD20 antibody is referred to as P03A05 and is further described in the description of Table 1 below. In embodiments, the anti-CD20 antibody has the amino acid sequence of rituximab, except that the heavy chain CDR1 amino acid sequence is YTSWMYN (SEQ ID NO: 596).

[0150] In embodiments, the anti-CD20 antibody includes a heavy chain CDR1 encoded by a nucleotide sequence of TGGTTGTGGACAAGCTATAAC (SEQ ID NO: 556). In embodiments, the anti-CD20 antibody further includes a heavy chain CDR2 encoded by a nucleotide sequence of ATTTATCCGGGCAACGGCGAT (SEQ ID NO: 549), and a heavy chain CDR3 encoded by nucleotide sequence of CGCAGCACCTATTATGGCGGCGATTGGTATTTTAAC (SEQ ID NO: 550). In embodiments, the anti-CD20 antibody further includes a light chain CDR1 encoded by a nucleotide sequence of GCGAGCAGCAGCGTGAGC (SEQ ID NO: 630), the light chain CDR2 is encoded by a nucleotide sequence of GGAAGCGGCACCAGC (SEQ ID NO: 631), and the light chain CDR3 is encoded by a nucleotide sequence of TGGACCAGCAACCCGCCG (SEQ ID NO: 632). In embodiments, this anti-CD20 antibody is referred to as P05B09 and is further described in the description of Table 1 below. In embodiments, the anti-CD20 antibody is encoded by a nucleic acid sequence that encodes the amino acid sequence of rituximab, except that the heavy chain CDR1 sequence is encoded by a nucleotide sequence of TGGTTGTGGACAAGCTATAAC (SEQ ID NO: 556).

[0151] In embodiments, the anti-CD20 antibody includes a heavy chain CDR1 amino acid sequence of WLWTSYN (SEQ ID NO: 597). In embodiments, the anti-CD20 antibody further includes a heavy chain CDR2 amino acid sequence of IYPGNGD (SEQ ID NO: 590) and a heavy chain CDR3 amino acid sequence of RSTYYGGDWYFN (SEQ ID NO: 591). In embodiments, the anti-CD20 antibody further includes the light chain CDR1 amino acid sequence of ASSSVS (SEQ ID NO: 633), the light chain CDR2 amino acid sequence of GSGTS (SEQ ID NO: 634), and the light chain CDR3 amino acid of WTSNPP (SEQ ID NO: 635). In embodiments, this anti-CD20 antibody is referred to as P05B09 and is further described in the description of Table 1 below. In embodiments, the anti-CD20 antibody has the amino acid sequence of rituximab, except that the heavy chain CDR1 amino acid sequence is WLWTSYN (SEQ ID NO: 597).

[0152] In embodiments, the anti-CD20 antibody includes a heavy chain CDR1 encoded by a nucleotide sequence of TATACCTGGGGGATTTATAAC (SEQ ID NO: 557). In embodiments, the anti-CD20 antibody further includes a heavy chain CDR2 encoded by a nucleotide sequence of ATTTATCCGGGCAACGGCGAT (SEQ ID NO: 549), and a heavy chain CDR3 encoded by nucleotide sequence of CGCAGCACCTATTATGGCGGCGATTGGTATTTTAAC (SEQ ID NO: 550). In embodiments, the anti-CD20 antibody further includes a light chain CDR1 encoded by a nucleotide sequence of GCGAGCAGCAGCGTGAGC (SEQ ID NO: 630), the light chain CDR2 is encoded by a nucleotide sequence of GGAAGCGGCACCAGC (SEQ ID NO: 631), and the light chain CDR3 is encoded by a nucleotide sequence of TGGACCAGCAACCCGCCG (SEQ ID NO: 632). In embodiments, this anti-CD20 antibody is referred to as P05H07 and is further described in the description of Table 1 below. In embodiments, the anti-CD20 antibody is encoded by a nucleic acid sequence that encodes the amino acid sequence of rituximab, except that the heavy chain CDR1 sequence is encoded by a nucleotide sequence of TATACCTGGGGGATTTATAAC (SEQ ID NO: 557).

[0153] In embodiments, the anti-CD20 antibody includes a heavy chain CDR1 amino acid sequence of YTWGIYN (SEQ ID NO: 598). In embodiments, the anti-CD20 antibody further includes a heavy chain CDR2 amino acid sequence of IYPGNGD (SEQ ID NO: 590) and a heavy chain CDR3 amino acid sequence of RSTYYGGDWYFN (SEQ ID NO: 591). In embodiments, the anti-CD20 antibody further includes the light chain CDR1 amino acid sequence of ASSSVS (SEQ ID NO: 633), the light chain CDR2 amino acid sequence of GSGTS (SEQ ID NO: 634), and the light chain CDR3 amino acid of WTSNPP (SEQ ID NO: 635). In embodiments, this anti-CD20 antibody is referred to as P05H07 and is further described in the description of Table 1 below. In embodiments, the anti-CD20 antibody has the amino acid sequence of rituximab, except that the heavy chain CDR1 amino acid sequence is YTWGIYN (SEQ ID NO: 598).

[0154] In embodiments, the anti-CD20 antibody includes a heavy chain CDR1 encoded by a nucleotide sequence of TATACCTTCACAAGGTATAAT (SEQ ID NO: 558). In embodiments, the anti-CD20 antibody further includes a heavy chain CDR2 encoded by a nucleotide sequence of ATTTATCCGGGCAACGGCGAT (SEQ ID NO: 549), and a heavy chain CDR3 encoded by nucleotide sequence of CGCAGCACCTATTATGGCGGCGATTGGTATTTTAAC (SEQ ID NO: 550). In embodiments, the anti-CD20 antibody further includes a light chain CDR1 encoded by a nucleotide sequence of GCGAGCAGCAGCGTGAGC (SEQ ID NO: 630), the light chain CDR2 is encoded by a nucleotide sequence of GGAAGCGGCACCAGC (SEQ ID NO: 631), and the light chain CDR3 is encoded by a nucleotide sequence of TGGACCAGCAACCCGCCG (SEQ ID NO: 632). In embodiments, this anti-CD20 antibody is referred to as P04A02 and is further described in the description of Table 1 below. In embodiments, the anti-CD20 antibody is encoded by a nucleic acid sequence that encodes the amino acid sequence of rituximab, except that the heavy chain CDR1 sequence is encoded by a nucleotide sequence of TATACCTTCACAAGGTATAAT (SEQ ID NO: 558).

[0155] In embodiments, the anti-CD20 antibody includes a heavy chain CDR1 amino acid sequence of YTFTRYN (SEQ ID NO: 599). In embodiments, the anti-CD20 antibody further includes a heavy chain CDR2 amino acid sequence of IYPGNGD (SEQ ID NO: 590) and a heavy chain CDR3 amino acid sequence of RSTYYGGDWYFN (SEQ ID NO: 591). In embodiments, the anti-CD20 antibody further includes the light chain CDR1 amino acid sequence of ASSSVS (SEQ ID NO: 633), the light chain CDR2 amino acid sequence of GSGTS (SEQ ID NO: 634), and the light chain CDR3 amino acid of WTSNPP (SEQ ID NO: 635). In embodiments, this anti-CD20 antibody is referred to as P04A02 and is further described in the description of Table 1 below. In embodiments, the anti-CD20 antibody has the amino acid sequence of rituximab, except that the heavy chain CDR1 amino acid sequence is YTFTRYN (SEQ ID NO: 599).

[0156] In an embodiment, the antibody that binds CD20 or an antigen fragment thereof includes in sequence: a CDR1 encoded by a nucleotide sequence of TATACCTTCACATTTCCTTAT (SEQ ID NO: 559). In embodiments, the anti-CD20 antibody further includes a heavy chain CDR2 encoded by a nucleotide sequence of ATTTATCCGGGCAACGGCGAT (SEQ ID NO: 549), and a heavy chain CDR3 encoded by nucleotide sequence of CGCAGCACCTATTATGGCGGCGATTGGTATTTTAAC (SEQ ID NO: 550). In embodiments, the anti-CD20 antibody further includes a light chain CDR1 encoded by a nucleotide sequence of GCGAGCAGCAGCGTGAGC (SEQ ID NO: 630), the light chain CDR2 is encoded by a nucleotide sequence of GGAAGCGGCACCAGC (SEQ ID NO: 631), and the light chain CDR3 is encoded by a nucleotide sequence of TGGACCAGCAACCCGCCG (SEQ ID NO: 632). In embodiments, this anti-CD20 antibody is referred to as P05F06 and is further described in the description of Table 1 below. In embodiments, the anti-CD20 antibody is encoded by a nucleic acid sequence that encodes the amino acid sequence of rituximab, except that the heavy chain CDR1 sequence is encoded by a nucleotide sequence of TATACCTTCACATTTCCTTAT (SEQ ID NO: 559).

[0157] In embodiments, the anti-CD20 antibody includes a heavy chain CDR1 amino acid sequence of YTFTFPY (SEQ ID NO: 600). In embodiments, the anti-CD20 antibody further includes a heavy chain CDR2 amino acid sequence of IYPGNGD (SEQ ID NO: 590) and a heavy chain CDR3 amino acid sequence of RSTYYGGDWYFN (SEQ ID NO: 591). In embodiments, the anti-CD20 antibody further includes the light chain CDR1 amino acid sequence of ASSSVS (SEQ ID NO: 633), the light chain CDR2 amino acid sequence of GSGTS (SEQ ID NO: 634), and the light chain CDR3 amino acid of WTSNPP (SEQ ID NO: 635). In embodiments, this anti-CD20 antibody is referred to as P05F06 and is further described in the description of Table 1 below. In embodiments, the anti-CD20 antibody has the amino acid sequence of rituximab, except that the heavy chain CDR1 amino acid sequence is YTFTFPY (SEQ ID NO: 600).

[0158] In embodiments, the anti-CD20 antibody includes a heavy chain CDR1 encoded by a nucleotide sequence of TATACCGGTATTCGGTATAAC (SEQ ID NO: 560). In embodiments, the anti-CD20 antibody further includes a heavy chain CDR2 encoded by a nucleotide sequence of ATTTATCCGGGCAACGGCGAT (SEQ ID NO: 549), and a heavy chain CDR3 encoded by nucleotide sequence of CGCAGCACCTATTATGGCGGCGATTGGTATTTTAAC (SEQ ID NO: 550). In embodiments, the anti-CD20 antibody further includes a light chain CDR1 encoded by a nucleotide sequence of GCGAGCAGCAGCGTGAGC (SEQ ID NO: 630), the light chain CDR2 is encoded by a nucleotide sequence of GGAAGCGGCACCAGC (SEQ ID NO: 631), and the light chain CDR3 is encoded by a nucleotide sequence of TGGACCAGCAACCCGCCG (SEQ ID NO: 632). In embodiments, this anti-CD20 antibody is referred to as P07C04 and is further described in the description of Table 1 below. In embodiments, the anti-CD20 antibody is encoded by a nucleic acid sequence that encodes the amino acid sequence of rituximab, except that the heavy chain CDR1 sequence is encoded by a nucleotide sequence of TATACCGGTATTCGGTATAAC (SEQ ID NO: 560).

[0159] In embodiments, the anti-CD20 antibody includes a heavy chain CDR1 amino acid sequence of YTGIRYN (SEQ ID NO: 601). In embodiments, the anti-CD20 antibody further includes a heavy chain CDR2 amino acid sequence of IYPGNGD (SEQ ID NO: 590) and a heavy chain CDR3 amino acid sequence of RSTYYGGDWYFN (SEQ ID NO: 591). In embodiments, the anti-CD20 antibody further includes the light chain CDR1 amino acid sequence of ASSSVS (SEQ ID NO: 633), the light chain CDR2 amino acid sequence of GSGTS (SEQ ID NO: 634), and the light chain CDR3 amino acid of WTSNPP (SEQ ID NO: 635). In embodiments, this anti-CD20 antibody is referred to as P07C04 and is further described in the description of Table 1 below. In embodiments, the anti-CD20 antibody has the amino acid sequence of rituximab, except that the heavy chain CDR1 amino acid sequence is YTGIRYN (SEQ ID NO: 601).

[0160] In embodiments, the anti-CD20 antibody includes a heavy chain CDR2 encoded by a nucleotide sequence of ATTTATCCGGGCTTGTATCTT (SEQ ID NO: 561). In embodiments, the anti-CD20 antibody further includes a heavy chain CDR1 encoded by a nucleotide sequence of TATACCTTCACAAGCTATAAC (SEQ ID NO: 548), and a heavy chain CDR3 encoded by a nucleotide sequence of CGCAGCACCTATTATGGCGGCGATTGGTATTTTAAC (SEQ ID NO: 550). In embodiments, the anti-CD20 antibody further includes a light chain CDR1 encoded by a nucleotide sequence of GCGAGCAGCAGCGTGAGC (SEQ ID NO: 630), a light chain CDR2 encoded by a nucleotide sequence of GGAAGCGGCACCAGC (SEQ ID NO: 631), and a light chain CDR3 encoded by a nucleotide sequence of TGGACCAGCAACCCGCCG (SEQ ID NO: 632). In embodiments, this anti-CD20 antibody is referred to as P04D06 and is further described in the description of Table 2 below. In embodiments, the anti-CD20 antibody is encoded by a nucleic acid sequence that encodes the amino acid sequence of rituximab, except that the heavy chain CDR2 sequence is encoded by a nucleotide sequence of ATTTATCCGGGCTTGTATCTT (SEQ ID NO: 561).

[0161] In embodiments, the anti-CD20 antibody includes a heavy chain CDR2 amino acid sequence of IYPGLYL (SEQ ID NO: 602). In embodiments, the anti-CD20 antibody further includes a heavy chain CDR1 amino acid sequence of YTFTSYN (SEQ ID NO: 589), and a heavy chain CDR3 amino acid sequence of RSTYYGGDWYFN (SEQ ID NO: 591). In embodiments, the anti-CD20 antibody further includes the light chain CDR1 amino acid sequence of ASSSVS (SEQ ID NO: 633), the light chain CDR2 amino acid sequence of GSGTS (SEQ ID NO: 634), and the light chain CDR3 amino acid of WTSNPP (SEQ ID NO: 635). In embodiments, this anti-CD20 antibody is referred to as P04D06 and is further described in the description of Table 2 below. In embodiments, the anti-CD20 antibody has the amino acid sequence of rituximab, except that the heavy chain CDR2 amino acid sequence is IYPGLYL (SEQ ID NO: 602).

[0162] In embodiments, the anti-CD20 antibody includes a heavy chain CDR2 encoded by a nucleotide sequence of CDR2 encoded by a nucleotide sequence of ATTTATCCGGGCACGCTGCTG (SEQ ID NO: 562). In embodiments, the anti-CD20 antibody further includes a heavy chain CDR1 encoded by a nucleotide sequence of TATACCTTCACAAGCTATAAC (SEQ ID NO: 548), and a heavy chain CDR3 encoded by a nucleotide sequence of CGCAGCACCTATTATGGCGGCGATTGGTATTTTAAC (SEQ ID NO: 550). In embodiments, the anti-CD20 antibody further includes a light chain CDR1 encoded by a nucleotide sequence of GCGAGCAGCAGCGTGAGC (SEQ ID NO: 630), a light chain CDR2 encoded by a nucleotide sequence of GGAAGCGGCACCAGC (SEQ ID NO: 631), and a light chain CDR3 encoded by a nucleotide sequence of TGGACCAGCAACCCGCCG (SEQ ID NO: 632). In embodiments, this anti-CD20 antibody is referred to as P04F01 and is further described in the description of Table 2 below. In embodiments, the anti-CD20 antibody is encoded by a nucleic acid sequence that encodes the amino acid sequence of rituximab, except that the heavy chain CDR2 sequence is encoded by a nucleotide sequence of ATTTATCCGGGCACGCTGCTG (SEQ ID NO: 562).

[0163] In embodiments, the anti-CD20 antibody includes a heavy chain CDR2 amino acid sequence of IYPGTLL (SEQ ID NO: 603). In embodiments, the anti-CD20 antibody further includes a heavy chain CDR1 amino acid sequence of YTFTSYN (SEQ ID NO: 589), and a heavy chain CDR3 amino acid sequence of RSTYYGGDWYFN (SEQ ID NO: 591). In embodiments, the anti-CD20 antibody further includes the light chain CDR1 amino acid sequence of ASSSVS (SEQ ID NO: 633), the light chain CDR2 amino acid sequence of GSGTS (SEQ ID NO: 634), and the light chain CDR3 amino acid of WTSNPP (SEQ ID NO: 635). In embodiments, this anti-CD20 antibody is referred to as P04F01 and is further described in the description of Table 2 below. In embodiments, the anti-CD20 antibody has the amino acid sequence of rituximab, except that the heavy chain CDR2 amino acid sequence is IYPGTLL (SEQ ID NO: 603).

[0164] In embodiments, the anti-CD20 antibody includes a heavy chain CDR2 encoded by a nucleotide sequence of ATTTATCCGGGCCATATGGGG (SEQ ID NO: 563). In embodiments, the anti-CD20 antibody further includes a heavy chain CDR1 encoded by a nucleotide sequence of TATACCTTCACAAGCTATAAC (SEQ ID NO: 548), and a heavy chain CDR3 encoded by a nucleotide sequence of CGCAGCACCTATTATGGCGGCGATTGGTATTTTAAC (SEQ ID NO: 550). In embodiments, the anti-CD20 antibody further includes a light chain CDR1 encoded by a nucleotide sequence of GCGAGCAGCAGCGTGAGC (SEQ ID NO: 630), a light chain CDR2 encoded by a nucleotide sequence of GGAAGCGGCACCAGC (SEQ ID NO: 631), and a light chain CDR3 encoded by a nucleotide sequence of TGGACCAGCAACCCGCCG (SEQ ID NO: 632). In embodiments, this anti-CD20 antibody is referred to as P04F02 and is further described in the description of Table 2 below. In embodiments, the anti-CD20 antibody is encoded by a nucleic acid sequence that encodes the amino acid sequence of rituximab, except that the heavy chain CDR2 sequence is encoded by a nucleotide sequence of ATTTATCCGGGCCATATGGGG (SEQ ID NO: 563).

[0165] In embodiments, the anti-CD20 antibody includes a heavy chain CDR2 amino acid sequence of IYPGHMG (SEQ ID NO: 604). In embodiments, the anti-CD20 antibody further includes a heavy chain CDR1 amino acid sequence of YTFTSYN (SEQ ID NO: 589), and a heavy chain CDR3 amino acid sequence of RSTYYGGDWYFN (SEQ ID NO: 591). In embodiments, the anti-CD20 antibody further includes the light chain CDR1 amino acid sequence of ASSSVS (SEQ ID NO: 633), the light chain CDR2 amino acid sequence of GSGTS (SEQ ID NO: 634), and the light chain CDR3 amino acid of WTSNPP (SEQ ID NO: 635). In embodiments, this anti-CD20 antibody is referred to as P04F02 and is further described in the description of Table 2 below. In embodiments, the anti-CD20 antibody has the amino acid sequence of rituximab, except that the heavy chain CDR2 amino acid sequence is IYPGHMG (SEQ ID NO: 604).

[0166] In embodiments, the anti-CD20 antibody includes a heavy chain CDR2 encoded by a nucleotide sequence of ATTTATCCGGGCATGCTTTGG (SEQ ID NO: 564). In embodiments, the anti-CD20 antibody further includes a heavy chain CDR1 encoded by a nucleotide sequence of TATACCTTCACAAGCTATAAC (SEQ ID NO: 548), and a heavy chain CDR3 encoded by a nucleotide sequence of CGCAGCACCTATTATGGCGGCGATTGGTATTTTAAC (SEQ ID NO: 550). In embodiments, the anti-CD20 antibody further includes a light chain CDR1 encoded by a nucleotide sequence of GCGAGCAGCAGCGTGAGC (SEQ ID NO: 630), a light chain CDR2 encoded by a nucleotide sequence of GGAAGCGGCACCAGC (SEQ ID NO: 631), and a light chain CDR3 encoded by a nucleotide sequence of TGGACCAGCAACCCGCCG (SEQ ID NO: 632). In embodiments, this anti-CD20 antibody is referred to as P04G03 and is further described in the description of Table 2 below. In embodiments, the anti-CD20 antibody is encoded by a nucleic acid sequence that encodes the amino acid sequence of rituximab, except that the heavy chain CDR2 sequence is encoded by a nucleotide sequence of ATTTATCCGGGCATGCTTTGG (SEQ ID NO: 564).

[0167] In embodiments, the anti-CD20 antibody includes a heavy chain CDR2 amino acid sequence of IYPGMLW (SEQ ID NO: 605). In embodiments, the anti-CD20 antibody further includes a heavy chain CDR1 amino acid sequence of YTFTSYN (SEQ ID NO: 589), and a heavy chain CDR3 amino acid sequence of RSTYYGGDWYFN (SEQ ID NO: 591). In embodiments, the anti-CD20 antibody further includes the light chain CDR1 amino acid sequence of ASSSVS (SEQ ID NO: 633), the light chain CDR2 amino acid sequence of GSGTS (SEQ ID NO: 634), and the light chain CDR3 amino acid of WTSNPP (SEQ ID NO: 635). In embodiments, this anti-CD20 antibody is referred to as P04G03 and is further described in the description of Table 2 below. In embodiments, the anti-CD20 antibody has the amino acid sequence of rituximab, except that the heavy chain CDR2 amino acid sequence is IYPGMLW (SEQ ID NO: 605).

[0168] In embodiments, the anti-CD20 antibody includes a heavy chain CDR2 encoded by a nucleotide sequence of ATTTATCCGGGCGCTGTTTCG (SEQ ID NO: 565). In embodiments, the anti-CD20 antibody further includes a heavy chain CDR1 encoded by a nucleotide sequence of TATACCTTCACAAGCTATAAC (SEQ ID NO: 548), and a heavy chain CDR3 encoded by a nucleotide sequence of CGCAGCACCTATTATGGCGGCGATTGGTATTTTAAC (SEQ ID NO: 550). In embodiments, the anti-CD20 antibody further includes a light chain CDR1 encoded by a nucleotide sequence of GCGAGCAGCAGCGTGAGC (SEQ ID NO: 630), a light chain CDR2 encoded by a nucleotide sequence of GGAAGCGGCACCAGC (SEQ ID NO: 631), and a light chain CDR3 encoded by a nucleotide sequence of TGGACCAGCAACCCGCCG (SEQ ID NO: 632). In embodiments, this anti-CD20 antibody is referred to as P04H06 and is further described in the description of Table 2 below. In embodiments, the anti-CD20 antibody is encoded by a nucleic acid sequence that encodes the amino acid sequence of rituximab, except that the heavy chain CDR2 sequence is encoded by a nucleotide sequence of ATTTATCCGGGCGCTGTTTCG (SEQ ID NO: 565).

[0169] In embodiments, the anti-CD20 antibody includes a heavy chain CDR2 amino acid sequence of YTFTSYN (SEQ ID NO: 589). In embodiments, the anti-CD20 antibody further includes a heavy chain CDR1 amino acid sequence of YTFTSYN (SEQ ID NO: 589), and a heavy chain CDR3 amino acid sequence of RSTYYGGDWYFN (SEQ ID NO: 591). In embodiments, the anti-CD20 antibody further includes the light chain CDR1 amino acid sequence of ASSSVS (SEQ ID NO: 633), the light chain CDR2 amino acid sequence of GSGTS (SEQ ID NO: 634), and the light chain CDR3 amino acid of WTSNPP (SEQ ID NO: 635). In embodiments, this anti-CD20 antibody is referred to as P04H06 and is further described in the description of Table 2 below. In embodiments, the anti-CD20 antibody has the amino acid sequence of rituximab, except that the heavy chain CDR2 amino acid sequence is IYPGAVS (SEQ ID NO: 606).

[0170] In embodiments, the anti-CD20 antibody includes a heavy chain CDR2 encoded by a nucleotide sequence of ATTTATCCGGGCACTCATAAG (SEQ ID NO: 566). In embodiments, the anti-CD20 antibody further includes a heavy chain CDR1 encoded by a nucleotide sequence of TATACCTTCACAAGCTATAAC (SEQ ID NO: 548), and a heavy chain CDR3 encoded by a nucleotide sequence of CGCAGCACCTATTATGGCGGCGATTGGTATTTTAAC (SEQ ID NO: 550). In embodiments, the anti-CD20 antibody further includes a light chain CDR1 encoded by a nucleotide sequence of GCGAGCAGCAGCGTGAGC (SEQ ID NO: 630), a light chain CDR2 encoded by a nucleotide sequence of GGAAGCGGCACCAGC (SEQ ID NO: 631), and a light chain CDR3 encoded by a nucleotide sequence of TGGACCAGCAACCCGCCG (SEQ ID NO: 632). In embodiments, this anti-CD20 antibody is referred to as P04H07 and is further described in the description of Table 2 below. In embodiments, the anti-CD20 antibody is encoded by a nucleic acid sequence that encodes the amino acid sequence of rituximab, except that the heavy chain CDR2 sequence is encoded by a nucleotide sequence of ATTTATCCGGGCACTCATAAG (SEQ ID NO: 566).

[0171] In embodiments, the anti-CD20 antibody includes a heavy chain CDR2 amino acid sequence of IYPGTHK (SEQ ID NO: 607). In embodiments, the anti-CD20 antibody further includes a heavy chain CDR1 amino acid sequence of YTFTSYN (SEQ ID NO: 589), and a heavy chain CDR3 amino acid sequence of RSTYYGGDWYFN (SEQ ID NO: 591). In embodiments, the anti-CD20 antibody further includes the light chain CDR1 amino acid sequence of ASSSVS (SEQ ID NO: 633), the light chain CDR2 amino acid sequence of GSGTS (SEQ ID NO: 634), and the light chain CDR3 amino acid of WTSNPP (SEQ ID NO: 635). In embodiments, this anti-CD20 antibody is referred to as P04H07 and is further described in the description of Table 2 below. In embodiments, the anti-CD20 antibody has the amino acid sequence of rituximab, except that the heavy chain CDR2 amino acid sequence is f IYPGTHK (SEQ ID NO: 607).

[0172] In embodiments, the anti-CD20 antibody includes a heavy chain CDR2 encoded by a nucleotide sequence of ATTTATCCGGGCACTCAGTCT (SEQ ID NO: 567). In embodiments, the anti-CD20 antibody further includes a heavy chain CDR1 encoded by a nucleotide sequence of TATACCTTCACAAGCTATAAC (SEQ ID NO: 548), and a heavy chain CDR3 encoded by a nucleotide sequence of CGCAGCACCTATTATGGCGGCGATTGGTATTTTAAC (SEQ ID NO: 550). In embodiments, the anti-CD20 antibody further includes a light chain CDR1 encoded by a nucleotide sequence of GCGAGCAGCAGCGTGAGC (SEQ ID NO: 630), a light chain CDR2 encoded by a nucleotide sequence of GGAAGCGGCACCAGC (SEQ ID NO: 631), and a light chain CDR3 encoded by a nucleotide sequence of TGGACCAGCAACCCGCCG (SEQ ID NO: 632). In embodiments, this anti-CD20 antibody is referred to as P06A06 and is further described in the description of Table 2 below. In embodiments, the anti-CD20 antibody is encoded by a nucleic acid sequence that encodes the amino acid sequence of rituximab, except that the heavy chain CDR2 sequence is encoded by a nucleotide sequence of ATTTATCCGGGCACTCAGTCT (SEQ ID NO: 567).

[0173] In embodiments, the anti-CD20 antibody includes a heavy chain CDR2 amino acid sequence of IYPGTQS (SEQ ID NO: 608). In embodiments, the anti-CD20 antibody further includes a heavy chain CDR1 amino acid sequence of YTFTSYN (SEQ ID NO: 589), and a heavy chain CDR3 amino acid sequence of RSTYYGGDWYFN (SEQ ID NO: 591). In embodiments, the anti-CD20 antibody further includes the light chain CDR1 amino acid sequence of ASSSVS (SEQ ID NO: 633), the light chain CDR2 amino acid sequence of GSGTS (SEQ ID NO: 634), and the light chain CDR3 amino acid of WTSNPP (SEQ ID NO: 635). In embodiments, this anti-CD20 antibody is referred to as P06A06 and is further described in the description of Table 2 below. In embodiments, the anti-CD20 antibody has the amino acid sequence of rituximab, except that the heavy chain CDR2 amino acid sequence is IYPGTQS (SEQ ID NO: 608).

[0174] In embodiments, the anti-CD20 antibody includes a heavy chain CDR2 encoded by a nucleotide sequence of ATTTATCCGGGCAATGCGGAT (SEQ ID NO: 568). In embodiments, the anti-CD20 antibody further includes a heavy chain CDR1 encoded by a nucleotide sequence of TATACCTTCACAAGCTATAAC (SEQ ID NO: 548), and a heavy chain CDR3 encoded by a nucleotide sequence of CGCAGCACCTATTATGGCGGCGATTGGTATTTTAAC (SEQ ID NO: 550). In embodiments, the anti-CD20 antibody further includes a light chain CDR1 encoded by a nucleotide sequence of GCGAGCAGCAGCGTGAGC (SEQ ID NO: 630), a light chain CDR2 encoded by a nucleotide sequence of GGAAGCGGCACCAGC (SEQ ID NO: 631), and a light chain CDR3 encoded by a nucleotide sequence of TGGACCAGCAACCCGCCG (SEQ ID NO: 632). In embodiments, this anti-CD20 antibody is referred to as P06B11 and is further described in the description of Table 2 below. In embodiments, the anti-CD20 antibody is encoded by a nucleic acid sequence that encodes the amino acid sequence of rituximab, except that the heavy chain CDR2 sequence is encoded by a nucleotide sequence of ATTTATCCGGGCAATGCGGAT (SEQ ID NO: 568).

[0175] In embodiments, the anti-CD20 antibody includes a heavy chain CDR2 amino acid sequence of IYPGNAD (SEQ ID NO: 609). In embodiments, the anti-CD20 antibody further includes a heavy chain CDR1 amino acid sequence of YTFTSYN (SEQ ID NO: 589), and a heavy chain CDR3 amino acid sequence of RSTYYGGDWYFN (SEQ ID NO: 591). In embodiments, the anti-CD20 antibody further includes the light chain CDR1 amino acid sequence of ASSSVS (SEQ ID NO: 633), the light chain CDR2 amino acid sequence of GSGTS (SEQ ID NO: 634), and the light chain CDR3 amino acid of WTSNPP (SEQ ID NO: 635). In embodiments, this anti-CD20 antibody is referred to as P06B11 and is further described in the description of Table 2 below. In embodiments, the anti-CD20 antibody has the amino acid sequence of rituximab, except that the heavy chain CDR2 amino acid sequence is IYPGNAD (SEQ ID NO: 609).

[0176] In embodiments, the anti-CD20 antibody includes a heavy chain CDR2 encoded by a nucleotide sequence of ATTTATCCGGGCAGTTTTGAG (SEQ ID NO: 569). In embodiments, the anti-CD20 antibody further includes a heavy chain CDR1 encoded by a nucleotide sequence of TATACCTTCACAAGCTATAAC (SEQ ID NO: 548), and a heavy chain CDR3 encoded by a nucleotide sequence of CGCAGCACCTATTATGGCGGCGATTGGTATTTTAAC (SEQ ID NO: 550). In embodiments, the anti-CD20 antibody further includes a light chain CDR1 encoded by a nucleotide sequence of GCGAGCAGCAGCGTGAGC (SEQ ID NO: 630), a light chain CDR2 encoded by a nucleotide sequence of GGAAGCGGCACCAGC (SEQ ID NO: 631), and a light chain CDR3 encoded by a nucleotide sequence of TGGACCAGCAACCCGCCG (SEQ ID NO: 632). In embodiments, this anti-CD20 antibody is referred to as P06H01 and is further described in the description of Table 2 below. In embodiments, the anti-CD20 antibody is encoded by a nucleic acid sequence that encodes the amino acid sequence of rituximab, except that the heavy chain CDR2 sequence is encoded by a nucleotide sequence of ATTTATCCGGGCAGTTTTGAG (SEQ ID NO: 569).

[0177] In embodiments, the anti-CD20 antibody includes a heavy chain CDR2 amino acid sequence of IYPGSFE (SEQ ID NO: 610). In embodiments, the anti-CD20 antibody further includes a heavy chain CDR1 amino acid sequence of YTFTSYN (SEQ ID NO: 589), and a heavy chain CDR3 amino acid sequence of RSTYYGGDWYFN (SEQ ID NO: 591). In embodiments, the anti-CD20 antibody further includes the light chain CDR1 amino acid sequence of ASSSVS (SEQ ID NO: 633), the light chain CDR2 amino acid sequence of GSGTS (SEQ ID NO: 634), and the light chain CDR3 amino acid of WTSNPP (SEQ ID NO: 635). In embodiments, this anti-CD20 antibody is referred to as P06H01 and is further described in the description of Table 2 below. In embodiments, the anti-CD20 antibody has the amino acid sequence of rituximab, except that the heavy chain CDR2 amino acid sequence is IYPGSFE (SEQ ID NO: 610).

[0178] In embodiments, the anti-CD20 antibody includes a heavy chain CDR2 encoded by a nucleotide sequence of ATTTATCCGGGCACGTTTCTT (SEQ ID NO: 570). In embodiments, the anti-CD20 antibody further includes a heavy chain CDR1 encoded by a nucleotide sequence of TATACCTTCACAAGCTATAAC (SEQ ID NO: 548), and a heavy chain CDR3 encoded by a nucleotide sequence of CGCAGCACCTATTATGGCGGCGATTGGTATTTTAAC (SEQ ID NO: 550). In embodiments, the anti-CD20 antibody further includes a light chain CDR1 encoded by a nucleotide sequence of GCGAGCAGCAGCGTGAGC (SEQ ID NO: 630), a light chain CDR2 encoded by a nucleotide sequence of GGAAGCGGCACCAGC (SEQ ID NO: 631), and a light chain CDR3 encoded by a nucleotide sequence of TGGACCAGCAACCCGCCG (SEQ ID NO: 632). In embodiments, this anti-CD20 antibody is referred to as P04D09 and is further described in the description of Table 2 below. In embodiments, the anti-CD20 antibody is encoded by a nucleic acid sequence that encodes the amino acid sequence of rituximab, except that the heavy chain CDR2 sequence is encoded by a nucleotide sequence of ATTTATCCGGGCACGTTTCTT (SEQ ID NO: 570).

[0179] In embodiments, the anti-CD20 antibody includes a heavy chain CDR2 amino acid sequence of IYPGTFL (SEQ ID NO: 611). In embodiments, the anti-CD20 antibody further includes a heavy chain CDR1 amino acid sequence of YTFTSYN (SEQ ID NO: 589), and a heavy chain CDR3 amino acid sequence of RSTYYGGDWYFN (SEQ ID NO: 591). In embodiments, the anti-CD20 antibody further includes the light chain CDR1 amino acid sequence of ASSSVS (SEQ ID NO: 633), the light chain CDR2 amino acid sequence of GSGTS (SEQ ID NO: 634), and the light chain CDR3 amino acid of WTSNPP (SEQ ID NO: 635). In embodiments, this anti-CD20 antibody is referred to as P04D09 and is further described in the description of Table 2 below. In embodiments, the anti-CD20 antibody has the amino acid sequence of rituximab, except that the heavy chain CDR2 amino acid sequence is IYPGTFL (SEQ ID NO: 611).

[0180] In embodiments, the anti-CD20 antibody includes a heavy chain CDR2 encoded by a nucleotide sequence of ATTTATCCGGTTACGGGCGAT (SEQ ID NO: 571). In embodiments, the anti-CD20 antibody further includes a heavy chain CDR1 encoded by a nucleotide sequence of TATACCTTCACAAGCTATAAC (SEQ ID NO: 548), and a heavy chain CDR3 encoded by a nucleotide sequence of CGCAGCACCTATTATGGCGGCGATTGGTATTTTAAC (SEQ ID NO: 550). In embodiments, the anti-CD20 antibody further includes a light chain CDR1 encoded by a nucleotide sequence of GCGAGCAGCAGCGTGAGC (SEQ ID NO: 630), a light chain CDR2 encoded by a nucleotide sequence of GGAAGCGGCACCAGC (SEQ ID NO: 631), and a light chain CDR3 encoded by a nucleotide sequence of TGGACCAGCAACCCGCCG (SEQ ID NO: 632). In embodiments, this anti-CD20 antibody is referred to as P05A03 and is further described in the description of Table 2 below. In embodiments, the anti-CD20 antibody is encoded by a nucleic acid sequence that encodes the amino acid sequence of rituximab, except that the heavy chain CDR2 sequence is encoded by a nucleotide sequence of ATTTATCCGGTTACGGGCGAT (SEQ ID NO: 571).

[0181] In embodiments, the anti-CD20 antibody includes a heavy chain CDR2 amino acid sequence of IYPVTGD (SEQ ID NO: 612). In embodiments, the anti-CD20 antibody further includes a heavy chain CDR1 amino acid sequence of YTFTSYN (SEQ ID NO: 589), and a heavy chain CDR3 amino acid sequence of RSTYYGGDWYFN (SEQ ID NO: 591). In embodiments, the anti-CD20 antibody further includes the light chain CDR1 amino acid sequence of ASSSVS (SEQ ID NO: 633), the light chain CDR2 amino acid sequence of GSGTS (SEQ ID NO: 634), and the light chain CDR3 amino acid of WTSNPP (SEQ ID NO: 635). In embodiments, this anti-CD20 antibody is referred to as P05A03 and is further described in the description of Table 2 below. In embodiments, the anti-CD20 antibody has the amino acid sequence of rituximab, except that the heavy chain CDR2 amino acid sequence is IYPVTGD (SEQ ID NO: 612).

[0182] In embodiments, the anti-CD20 antibody includes a heavy chain CDR2 encoded by a nucleotide sequence of ATTTATCCGTATCTGGGCGAT (SEQ ID NO: 572). In embodiments, the anti-CD20 antibody further includes a heavy chain CDR1 encoded by a nucleotide sequence of TATACCTTCACAAGCTATAAC (SEQ ID NO: 548), and a heavy chain CDR3 encoded by a nucleotide sequence of CGCAGCACCTATTATGGCGGCGATTGGTATTTTAAC (SEQ ID NO: 550). In embodiments, the anti-CD20 antibody further includes a light chain CDR1 encoded by a nucleotide sequence of GCGAGCAGCAGCGTGAGC (SEQ ID NO: 630), a light chain CDR2 encoded by a nucleotide sequence of GGAAGCGGCACCAGC (SEQ ID NO: 631), and a light chain CDR3 encoded by a nucleotide sequence of TGGACCAGCAACCCGCCG (SEQ ID NO: 632). In embodiments, this anti-CD20 antibody is referred to as P05A12 and is further described in the description of Table 2 below. In embodiments, the anti-CD20 antibody is encoded by a nucleic acid sequence that encodes the amino acid sequence of rituximab, except that the heavy chain CDR2 sequence is encoded by a nucleotide sequence of ATTTATCCGTATCTGGGCGAT (SEQ ID NO: 572).

[0183] In embodiments, the anti-CD20 antibody includes a heavy chain CDR2 amino acid sequence of IYPGLYL (SEQ ID NO: 602). In embodiments, the anti-CD20 antibody further includes a heavy chain CDR1 amino acid sequence of YTFTSYN (SEQ ID NO: 589), and a heavy chain CDR3 amino acid sequence of RSTYYGGDWYFN (SEQ ID NO: 591). In embodiments, the anti-CD20 antibody further includes the light chain CDR1 amino acid sequence of ASSSVS (SEQ ID NO: 633), the light chain CDR2 amino acid sequence of GSGTS (SEQ ID NO: 634), and the light chain CDR3 amino acid of WTSNPP (SEQ ID NO: 635). In embodiments, this anti-CD20 antibody is referred to as P05A12 and is further described in the description of Table 2 below. In embodiments, the anti-CD20 antibody has the amino acid sequence of rituximab, except that the heavy chain CDR2 amino acid sequence is IYPYLGD (SEQ ID NO: 613).

[0184] In embodiments, the anti-CD20 antibody includes a heavy chain CDR2 encoded by a nucleotide sequence of TTTATCCGTGGAATGGCGAT (SEQ ID NO: 573). In embodiments, the anti-CD20 antibody further includes a heavy chain CDR1 encoded by a nucleotide sequence of TATACCTTCACAAGCTATAAC (SEQ ID NO: 548), and a heavy chain CDR3 encoded by a nucleotide sequence of CGCAGCACCTATTATGGCGGCGATTGGTATTTTAAC (SEQ ID NO: 550). In embodiments, the anti-CD20 antibody further includes a light chain CDR1 encoded by a nucleotide sequence of GCGAGCAGCAGCGTGAGC (SEQ ID NO: 630), a light chain CDR2 encoded by a nucleotide sequence of GGAAGCGGCACCAGC (SEQ ID NO: 631), and a light chain CDR3 encoded by a nucleotide sequence of TGGACCAGCAACCCGCCG (SEQ ID NO: 632). In embodiments, this anti-CD20 antibody is referred to as P05B02 and is further described in the description of Table 2 below. In embodiments, the anti-CD20 antibody is encoded by a nucleic acid sequence that encodes the amino acid sequence of rituximab, except that the heavy chain CDR2 sequence is encoded by a nucleotide sequence of ATTTATCCGTGGAATGGCGAT (SEQ ID NO: 573).

[0185] In embodiments, the anti-CD20 antibody includes a heavy chain CDR2 amino acid sequence of IYPWNGD (SEQ ID NO: 614). In embodiments, the anti-CD20 antibody further includes a heavy chain CDR1 amino acid sequence of YTFTSYN (SEQ ID NO: 589), and a heavy chain CDR3 amino acid sequence of RSTYYGGDWYFN (SEQ ID NO: 591). In embodiments, the anti-CD20 antibody further includes the light chain CDR1 amino acid sequence of ASSSVS (SEQ ID NO: 633), the light chain CDR2 amino acid sequence of GSGTS (SEQ ID NO: 634), and the light chain CDR3 amino acid of WTSNPP (SEQ ID NO: 635). In embodiments, this anti-CD20 antibody is referred to as P05B02 and is further described in the description of Table 2 below. In embodiments, the anti-CD20 antibody has the amino acid sequence of rituximab, except that the heavy chain CDR2 amino acid sequence is IYPWNGD (SEQ ID NO: 614).

[0186] In embodiments, the anti-CD20 antibody includes a heavy chain CDR2 encoded by a nucleotide sequence of ATTTATCCGGGCTTGTATCTT (SEQ ID NO: 561). In embodiments, the anti-CD20 antibody further includes a heavy chain CDR1 encoded by a nucleotide sequence of TATACCTTCACAAGCTATAAC (SEQ ID NO: 548), and a heavy chain CDR3 encoded by a nucleotide sequence of CGCAGCACCTATTATGGCGGCGATTGGTATTTTAAC (SEQ ID NO: 550). In embodiments, the anti-CD20 antibody further includes a light chain CDR1 encoded by a nucleotide sequence of GCGAGCAGCAGCGTGAGC (SEQ ID NO: 630), a light chain CDR2 encoded by a nucleotide sequence of GGAAGCGGCACCAGC (SEQ ID NO: 631), and a light chain CDR3 encoded by a nucleotide sequence of TGGACCAGCAACCCGCCG (SEQ ID NO: 632). In embodiments, this anti-CD20 antibody is referred to as P06B04 and is further described in the description of Table 2 below. In embodiments, the anti-CD20 antibody is encoded by a nucleic acid sequence that encodes the amino acid sequence of rituximab, except that the heavy chain CDR2 sequence is encoded by a nucleotide sequence of ATTTATCCTCTGTGGGGCGAT (SEQ ID NO: 574).

[0187] In embodiments, the anti-CD20 antibody includes a heavy chain CDR2 amino acid sequence of IYPLWGD (SEQ ID NO: 615). In embodiments, the anti-CD20 antibody further includes a heavy chain CDR1 amino acid sequence of YTFTSYN (SEQ ID NO: 589), and a heavy chain CDR3 amino acid sequence of RSTYYGGDWYFN (SEQ ID NO: 591). In embodiments, the anti-CD20 antibody further includes the light chain CDR1 amino acid sequence of ASSSVS (SEQ ID NO: 633), the light chain CDR2 amino acid sequence of GSGTS (SEQ ID NO: 634), and the light chain CDR3 amino acid of WTSNPP (SEQ ID NO: 635). In embodiments, this anti-CD20 antibody is referred to as P06B04 and is further described in the description of Table 2 below. In embodiments, the anti-CD20 antibody has the amino acid sequence of rituximab, except that the heavy chain CDR2 amino acid sequence is IYPLWGD (SEQ ID NO: 615).

[0188] In embodiments, the anti-CD20 antibody includes a heavy chain CDR2 encoded by a nucleotide sequence of ATTTATCCGGGCAGTAGTCGT (SEQ ID NO: 575). In embodiments, the anti-CD20 antibody further includes a heavy chain CDR1 encoded by a nucleotide sequence of TATACCTTCACAAGCTATAAC (SEQ ID NO: 548), and a heavy chain CDR3 encoded by a nucleotide sequence of CGCAGCACCTATTATGGCGGCGATTGGTATTTTAAC (SEQ ID NO: 550). In embodiments, the anti-CD20 antibody further includes a light chain CDR1 encoded by a nucleotide sequence of GCGAGCAGCAGCGTGAGC (SEQ ID NO: 630), a light chain CDR2 encoded by a nucleotide sequence of GGAAGCGGCACCAGC (SEQ ID NO: 631), and a light chain CDR3 encoded by a nucleotide sequence of TGGACCAGCAACCCGCCG (SEQ ID NO: 632). In embodiments, this anti-CD20 antibody is referred to as P06B11 and is further described in the description of Table 2 below. In embodiments, the anti-CD20 antibody is encoded by a nucleic acid sequence that encodes the amino acid sequence of rituximab, except that the heavy chain CDR2 sequence is encoded by a nucleotide sequence of ATTTATCCGGGCAGTAGTCGT (SEQ ID NO: 575).

[0189] In embodiments, the anti-CD20 antibody includes a heavy chain CDR2 amino acid sequence of IYPGSSR (SEQ ID NO: 616). In embodiments, the anti-CD20 antibody further includes a heavy chain CDR1 amino acid sequence of YTFTSYN (SEQ ID NO: 589), and a heavy chain CDR3 amino acid sequence of RSTYYGGDWYFN (SEQ ID NO: 591). In embodiments, the anti-CD20 antibody further includes the light chain CDR1 amino acid sequence of ASSSVS (SEQ ID NO: 633), the light chain CDR2 amino acid sequence of GSGTS (SEQ ID NO: 634), and the light chain CDR3 amino acid of WTSNPP (SEQ ID NO: 635). In embodiments, this anti-CD20 antibody is referred to as P06B11 and is further described in the description of Table 2 below. In embodiments, the anti-CD20 antibody has the amino acid sequence of rituximab, except that the heavy chain CDR2 amino acid sequence is IYPGSSR (SEQ ID NO: 616).

[0190] In embodiments, the anti-CD20 antibody includes a heavy chain CDR2 encoded by a nucleotide sequence of ATTTATCCGGGCACTTTTCGT (SEQ ID NO: 576). In embodiments, the anti-CD20 antibody further includes a heavy chain CDR1 encoded by a nucleotide sequence of TATACCTTCACAAGCTATAAC (SEQ ID NO: 548), and a heavy chain CDR3 encoded by a nucleotide sequence of CGCAGCACCTATTATGGCGGCGATTGGTATTTTAAC (SEQ ID NO: 550). In embodiments, the anti-CD20 antibody further includes a light chain CDR1 encoded by a nucleotide sequence of GCGAGCAGCAGCGTGAGC (SEQ ID NO: 630), a light chain CDR2 encoded by a nucleotide sequence of GGAAGCGGCACCAGC (SEQ ID NO: 631), and a light chain CDR3 encoded by a nucleotide sequence of TGGACCAGCAACCCGCCG (SEQ ID NO: 632). In embodiments, this anti-CD20 antibody is referred to as P06H05 and is further described in the description of Table 2 below. In embodiments, the anti-CD20 antibody is encoded by a nucleic acid sequence that encodes the amino acid sequence of rituximab, except that the heavy chain CDR2 sequence is encoded by a nucleotide sequence of ATTTATCCGGGCACTTTTCGT (SEQ ID NO: 576).

[0191] In embodiments, the anti-CD20 antibody includes a heavy chain CDR2 amino acid sequence of IYPGTFR (SEQ ID NO: 617). In embodiments, the anti-CD20 antibody further includes a heavy chain CDR1 amino acid sequence of YTFTSYN (SEQ ID NO: 589), and a heavy chain CDR3 amino acid sequence of RSTYYGGDWYFN (SEQ ID NO: 591). In embodiments, the anti-CD20 antibody further includes the light chain CDR1 amino acid sequence of ASSSVS (SEQ ID NO: 633), the light chain CDR2 amino acid sequence of GSGTS (SEQ ID NO: 634), and the light chain CDR3 amino acid of WTSNPP (SEQ ID NO: 635). In embodiments, this anti-CD20 antibody is referred to as P06H05 and is further described in the description of Table 2 below. In embodiments, the anti-CD20 antibody has the amino acid sequence of rituximab, except that the heavy chain CDR2 amino acid sequence is IYPGTFR (SEQ ID NO: 617).

[0192] In embodiments, the anti-CD20 antibody includes a heavy chain CDR2 encoded by a nucleotide sequence of ATTTATCCGGGCGTTGGTCGG (SEQ ID NO: 577). In embodiments, the anti-CD20 antibody further includes a heavy chain CDR1 encoded by a nucleotide sequence of TATACCTTCACAAGCTATAAC (SEQ ID NO: 548), and a heavy chain CDR3 encoded by a nucleotide sequence of CGCAGCACCTATTATGGCGGCGATTGGTATTTTAAC (SEQ ID NO: 550). In embodiments, the anti-CD20 antibody further includes a light chain CDR1 encoded by a nucleotide sequence of GCGAGCAGCAGCGTGAGC (SEQ ID NO: 630), a light chain CDR2 encoded by a nucleotide sequence of GGAAGCGGCACCAGC (SEQ ID NO: 631), and a light chain CDR3 encoded by a nucleotide sequence of TGGACCAGCAACCCGCCG (SEQ ID NO: 632). In embodiments, this anti-CD20 antibody is referred to as P06H11 and is further described in the description of Table 2 below. In embodiments, the anti-CD20 antibody is encoded by a nucleic acid sequence that encodes the amino acid sequence of rituximab, except that the heavy chain CDR2 sequence is encoded by a nucleotide sequence of ATTTATCCGGGCGTTGGTCGG (SEQ ID NO: 577).

[0193] In embodiments, the anti-CD20 antibody includes a heavy chain CDR2 amino acid sequence of IYPGVGR (SEQ ID NO: 618). In embodiments, the anti-CD20 antibody further includes a heavy chain CDR1 amino acid sequence of YTFTSYN (SEQ ID NO: 589), and a heavy chain CDR3 amino acid sequence of RSTYYGGDWYFN (SEQ ID NO: 591). In embodiments, the anti-CD20 antibody further includes the light chain CDR1 amino acid sequence of ASSSVS (SEQ ID NO: 633), the light chain CDR2 amino acid sequence of GSGTS (SEQ ID NO: 634), and the light chain CDR3 amino acid of WTSNPP (SEQ ID NO: 635). In embodiments, this anti-CD20 antibody is referred to as P06H11 and is further described in the description of Table 2 below. In embodiments, the anti-CD20 antibody has the amino acid sequence of rituximab, except that the heavy chain CDR2 amino acid sequence is IYPGVGR (SEQ ID NO: 618).

[0194] In embodiments, the anti-CD20 antibody includes a heavy chain CDR2 encoded by a nucleotide sequence of ATTTATCCGGGCTCTCAGGCG (SEQ ID NO: 578). In embodiments, the anti-CD20 antibody further includes a heavy chain CDR1 encoded by a nucleotide sequence of TATACCTTCACAAGCTATAAC (SEQ ID NO: 548), and a heavy chain CDR3 encoded by a nucleotide sequence of CGCAGCACCTATTATGGCGGCGATTGGTATTTTAAC (SEQ ID NO: 550). In embodiments, the anti-CD20 antibody further includes a light chain CDR1 encoded by a nucleotide sequence of GCGAGCAGCAGCGTGAGC (SEQ ID NO: 630), a light chain CDR2 encoded by a nucleotide sequence of GGAAGCGGCACCAGC (SEQ ID NO: 631), and a light chain CDR3 encoded by a nucleotide sequence of TGGACCAGCAACCCGCCG (SEQ ID NO: 632). In embodiments, this anti-CD20 antibody is referred to as P07F02 and is further described in the description of Table 2 below. In embodiments, the anti-CD20 antibody is encoded by a nucleic acid sequence that encodes the amino acid sequence of rituximab, except that the heavy chain CDR2 sequence is encoded by a nucleotide sequence of ATTTATCCGGGCTCTCAGGCG (SEQ ID NO: 578).

[0195] In embodiments, the anti-CD20 antibody includes a heavy chain CDR2 amino acid sequence of IYPGSEA (SEQ ID NO: 619). In embodiments, the anti-CD20 antibody further includes a heavy chain CDR1 amino acid sequence of YTFTSYN (SEQ ID NO: 589), and a heavy chain CDR3 amino acid sequence of RSTYYGGDWYFN (SEQ ID NO: 591). In embodiments, the anti-CD20 antibody further includes the light chain CDR1 amino acid sequence of ASSSVS (SEQ ID NO: 633), the light chain CDR2 amino acid sequence of GSGTS (SEQ ID NO: 634), and the light chain CDR3 amino acid of WTSNPP (SEQ ID NO: 635). In embodiments, this anti-CD20 antibody is referred to as P07F02 and is further described in the description of Table 2 below. In embodiments, the anti-CD20 antibody has the amino acid sequence of rituximab, except that the heavy chain CDR2 amino acid sequence is IYPGSEA (SEQ ID NO: 619).

[0196] In embodiments, the anti-CD20 antibody includes a heavy chain CDR2 encoded by a nucleotide sequence of ATTTATCCGGGCAGTAATATG (SEQ ID NO: 579). In embodiments, the anti-CD20 antibody further includes a heavy chain CDR1 encoded by a nucleotide sequence of TATACCTTCACAAGCTATAAC (SEQ ID NO: 548), and a heavy chain CDR3 encoded by a nucleotide sequence of CGCAGCACCTATTATGGCGGCGATTGGTATTTTAAC (SEQ ID NO: 550). In embodiments, the anti-CD20 antibody further includes a light chain CDR1 encoded by a nucleotide sequence of GCGAGCAGCAGCGTGAGC (SEQ ID NO: 630), a light chain CDR2 encoded by a nucleotide sequence of GGAAGCGGCACCAGC (SEQ ID NO: 631), and a light chain CDR3 encoded by a nucleotide sequence of TGGACCAGCAACCCGCCG (SEQ ID NO: 632). In embodiments, this anti-CD20 antibody is referred to as P07F10 and is further described in the description of Table 2 below. In embodiments, the anti-CD20 antibody is encoded by a nucleic acid sequence that encodes the amino acid sequence of rituximab, except that the heavy chain CDR2 sequence is encoded by a nucleotide sequence of ATTTATCCGGGCAGTAATATG (SEQ ID NO: 579).

[0197] In embodiments, the anti-CD20 antibody includes a heavy chain CDR2 amino acid sequence of IYPGSNM (SEQ ID NO: 620). In embodiments, the anti-CD20 antibody further includes a heavy chain CDR1 amino acid sequence of YTFTSYN (SEQ ID NO: 589), and a heavy chain CDR3 amino acid sequence of RSTYYGGDWYFN (SEQ ID NO: 591). In embodiments, the anti-CD20 antibody further includes the light chain CDR1 amino acid sequence of ASSSVS (SEQ ID NO: 633), the light chain CDR2 amino acid sequence of GSGTS (SEQ ID NO: 634), and the light chain CDR3 amino acid of WTSNPP (SEQ ID NO: 635). In embodiments, this anti-CD20 antibody is referred to as P07F10 and is further described in the description of Table 2 below. In embodiments, the anti-CD20 antibody has the amino acid sequence of rituximab, except that the heavy chain CDR2 amino acid sequence is IYPGSNM (SEQ ID NO: 620).

[0198] In embodiments, the anti-CD20 antibody includes a heavy chain CDR2 encoded by a nucleotide sequence of ATTTATCCGGGCGCTTTTCTT (SEQ ID NO: 580). In embodiments, the anti-CD20 antibody further includes a heavy chain CDR1 encoded by a nucleotide sequence of TATACCTTCACAAGCTATAAC (SEQ ID NO: 548), and a heavy chain CDR3 encoded by a nucleotide sequence of CGCAGCACCTATTATGGCGGCGATTGGTATTTTAAC (SEQ ID NO: 550). In embodiments, the anti-CD20 antibody further includes a light chain CDR1 encoded by a nucleotide sequence of GCGAGCAGCAGCGTGAGC (SEQ ID NO: 630), a light chain CDR2 encoded by a nucleotide sequence of GGAAGCGGCACCAGC (SEQ ID NO: 631), and a light chain CDR3 encoded by a nucleotide sequence of TGGACCAGCAACCCGCCG (SEQ ID NO: 632). In embodiments, this anti-CD20 antibody is referred to as P08B05 and is further described in the description of Table 2 below. In embodiments, the anti-CD20 antibody is encoded by a nucleic acid sequence that encodes the amino acid sequence of rituximab, except that the heavy chain CDR2 sequence is encoded by a nucleotide sequence of ATTTATCCGGGCGCTTTTCTT (SEQ ID NO: 580).

[0199] In embodiments, the anti-CD20 antibody includes a heavy chain CDR2 amino acid sequence of IYPGAFL (SEQ ID NO: 621). In embodiments, the anti-CD20 antibody further includes a heavy chain CDR1 amino acid sequence of YTFTSYN (SEQ ID NO: 589), and a heavy chain CDR3 amino acid sequence of RSTYYGGDWYFN (SEQ ID NO: 591). In embodiments, the anti-CD20 antibody further includes the light chain CDR1 amino acid sequence of ASSSVS (SEQ ID NO: 633), the light chain CDR2 amino acid sequence of GSGTS (SEQ ID NO: 634), and the light chain CDR3 amino acid of WTSNPP (SEQ ID NO: 635). In embodiments, this anti-CD20 antibody is referred to as P08B05 and is further described in the description of Table 2 below. In embodiments, the anti-CD20 antibody has the amino acid sequence of rituximab, except that the heavy chain CDR2 amino acid sequence is IYPGAFL (SEQ ID NO: 621).

[0200] In embodiments, the anti-CD20 antibody includes a heavy chain CDR3 encoded by a nucleotide sequence of CAGTCTATTTATTATGGCGGCGATTGGTATTTTAAC (SEQ ID NO: 581). In embodiments, the anti-CD20 antibody further includes a heavy chain CDR1 encoded by a nucleotide sequence of TATACCTTCACAAGCTATAAC (SEQ ID NO: 548), and a heavy chain CDR2 encoded by a nucleotide sequence of ATTTATCCGGGCAACGGCGAT (SEQ ID NO: 549). In embodiments, the anti-CD20 antibody further includes a light chain CDR1 encoded by a nucleotide sequence of GCGAGCAGCAGCGTGAGC (SEQ ID NO: 630), a light chain CDR2 encoded by a nucleotide sequence of GGAAGCGGCACCAGC (SEQ ID NO: 631), and a light chain CDR3 encoded by a nucleotide sequence of TGGACCAGCAACCCGCCG (SEQ ID NO: 632). In embodiments, this anti-CD20 antibody is referred to as P07C02 and is further described in the description of Table 3 below. In embodiments, the anti-CD20 antibody is encoded by a nucleic acid sequence that encodes the amino acid sequence of rituximab, except that the heavy chain CDR3 sequence is encoded by a nucleotide sequence of CAGTCTATTTATTATGGCGGCGATTGGTATTTTAAC (SEQ ID NO: 581).

[0201] In embodiments, the anti-CD20 antibody includes a heavy chain CDR3 amino acid sequence of QSIYYGGDWYFN (SEQ ID NO: 622). In embodiments, the anti-CD20 antibody further includes a heavy chain CDR1 amino acid sequence of YTFTSYN (SEQ ID NO: 589), and a heavy chain CDR2 amino acid sequence of IYPGNGD (SEQ ID NO: 590). In embodiments, the anti-CD20 antibody further includes the light chain CDR1 amino acid sequence of ASSSVS (SEQ ID NO: 633), the light chain CDR2 amino acid sequence of GSGTS (SEQ ID NO: 634), and the light chain CDR3 amino acid of WTSNPP (SEQ ID NO: 635). In embodiments, this anti-CD20 antibody is referred to as P07C02 and is further described in the description of Table 3 below. In embodiments, the anti-CD20 antibody has the amino acid sequence of rituximab, except that the heavy chain CDR3 amino acid sequence is QSIYYGGDWYFN (SEQ ID NO: 622).

[0202] In embodiments, the anti-CD20 antibody includes a heavy chain CDR3 encoded by a nucleotide sequence of CGCAGCACCTATTATGGCGGCGATTGGCTGATTGCT (SEQ ID NO: 582). In embodiments, the anti-CD20 antibody further includes a heavy chain CDR1 encoded by a nucleotide sequence of TATACCTTCACAAGCTATAAC (SEQ ID NO: 548), and a heavy chain CDR2 encoded by a nucleotide sequence of ATTTATCCGGGCAACGGCGAT (SEQ ID NO: 549). In embodiments, the anti-CD20 antibody further includes a light chain CDR1 encoded by a nucleotide sequence of GCGAGCAGCAGCGTGAGC (SEQ ID NO: 630), a light chain CDR2 encoded by a nucleotide sequence of GGAAGCGGCACCAGC (SEQ ID NO: 631), and a light chain CDR3 encoded by a nucleotide sequence of TGGACCAGCAACCCGCCG (SEQ ID NO: 632). In embodiments, this anti-CD20 antibody is referred to as P07H08 and is further described in the description of Table 3 below. In embodiments, the anti-CD20 antibody is encoded by a nucleic acid sequence that encodes the amino acid sequence of rituximab, except that the heavy chain CDR3 sequence is encoded by a nucleotide sequence of CGCAGCACCTATTATGGCGGCGATTGGCTGATTGCT (SEQ ID NO: 582).

[0203] In embodiments, the anti-CD20 antibody includes a heavy chain CDR3 amino acid sequence of RSTYYGGDWLIA (SEQ ID NO: 623). In embodiments, the anti-CD20 antibody further includes a heavy chain CDR1 amino acid sequence of YTFTSYN (SEQ ID NO: 589), and a heavy chain CDR2 amino acid sequence of IYPGNGD (SEQ ID NO: 590). In embodiments, the anti-CD20 antibody further includes the light chain CDR1 amino acid sequence of ASSSVS (SEQ ID NO: 633), the light chain CDR2 amino acid sequence of GSGTS (SEQ ID NO: 634), and the light chain CDR3 amino acid of WTSNPP (SEQ ID NO: 635). In embodiments, this anti-CD20 antibody is referred to as P07H08and is further described in the description of Table 3 below. In embodiments, the anti-CD20 antibody has the amino acid sequence of rituximab, except that the heavy chain CDR3 amino acid sequence is RSTYYGGDWLIA (SEQ ID NO: 623).

[0204] In embodiments, the anti-CD20 antibody includes a heavy chain CDR3 encoded by a nucleotide sequence of CGCAGCACCGTGGCGGGGGGCGATTGGTATTTTAA (SEQ ID NO: 583). In embodiments, the anti-CD20 antibody further includes a heavy chain CDR1 encoded by a nucleotide sequence of TATACCTTCACAAGCTATAAC (SEQ ID NO: 548), and a heavy chain CDR2 encoded by a nucleotide sequence of ATTTATCCGGGCAACGGCGAT (SEQ ID NO: 549). In embodiments, the anti-CD20 antibody further includes a light chain CDR1 encoded by a nucleotide sequence of GCGAGCAGCAGCGTGAGC (SEQ ID NO: 630), a light chain CDR2 encoded by a nucleotide sequence of GGAAGCGGCACCAGC (SEQ ID NO: 631), and a light chain CDR3 encoded by a nucleotide sequence of TGGACCAGCAACCCGCCG (SEQ ID NO: 632). In embodiments, this anti-CD20 antibody is referred to as P07H10and is further described in the description of Table 3 below. In embodiments, the anti-CD20 antibody is encoded by a nucleic acid sequence that encodes the amino acid sequence of rituximab, except that the heavy chain CDR3 sequence is encoded by a nucleotide sequence of CGCAGCACCGTGGCGGGGGGCGATTGGTATTTTAA (SEQ ID NO: 583).

[0205] In embodiments, the anti-CD20 antibody includes a heavy chain CDR3 amino acid sequence of RSTVAGGDWYFN (SEQ ID NO: 624). In embodiments, the anti-CD20 antibody further includes a heavy chain CDR1 amino acid sequence of YTFTSYN (SEQ ID NO: 589), and a heavy chain CDR2 amino acid sequence of IYPGNGD (SEQ ID NO: 590). In embodiments, the anti-CD20 antibody further includes the light chain CDR1 amino acid sequence of ASSSVS (SEQ ID NO: 633), the light chain CDR2 amino acid sequence of GSGTS (SEQ ID NO: 634), and the light chain CDR3 amino acid of WTSNPP (SEQ ID NO: 635). In embodiments, this anti-CD20 antibody is referred to as P07H10 and is further described in the description of Table 3 below. In embodiments, the anti-CD20 antibody has the amino acid sequence of rituximab, except that the heavy chain CDR3 amino acid sequence is RSTVAGGDWYFN (SEQ ID NO: 624).

[0206] In embodiments, the anti-CD20 antibody includes a heavy chain CDR3 encoded by a nucleotide sequence of CGCAGCACCTATTATGGCGGCGATTGGCGGTGGCGG (SEQ ID NO: 584). In embodiments, the anti-CD20 antibody further includes a heavy chain CDR1 encoded by a nucleotide sequence of TATACCTTCACAAGCTATAAC (SEQ ID NO: 548), and a heavy chain CDR2 encoded by a nucleotide sequence of ATTTATCCGGGCAACGGCGAT (SEQ ID NO: 549). In embodiments, the anti-CD20 antibody further includes a light chain CDR1 encoded by a nucleotide sequence of GCGAGCAGCAGCGTGAGC (SEQ ID NO: 630), a light chain CDR2 encoded by a nucleotide sequence of GGAAGCGGCACCAGC (SEQ ID NO: 631), and a light chain CDR3 encoded by a nucleotide sequence of TGGACCAGCAACCCGCCG (SEQ ID NO: 632). In embodiments, this anti-CD20 antibody is referred to as P08A01 and is further described in the description of Table 3 below. In embodiments, the anti-CD20 antibody is encoded by a nucleic acid sequence that encodes the amino acid sequence of rituximab, except that the heavy chain CDR3 sequence is encoded by a nucleotide sequence of CGCAGCACCTATTATGGCGGCGATTGGCGGTGGCGG (SEQ ID NO: 584).

[0207] In embodiments, the anti-CD20 antibody includes a heavy chain CDR3 amino acid sequence of RSTYYGGDWRWR (SEQ ID NO: 625). In embodiments, the anti-CD20 antibody further includes a heavy chain CDR1 amino acid sequence of YTFTSYN (SEQ ID NO: 589), and a heavy chain CDR2 amino acid sequence of IYPGNGD (SEQ ID NO: 590). In embodiments, the anti-CD20 antibody further includes the light chain CDR1 amino acid sequence of ASSSVS (SEQ ID NO: 633), the light chain CDR2 amino acid sequence of GSGTS (SEQ ID NO: 634), and the light chain CDR3 amino acid of WTSNPP (SEQ ID NO: 635). In embodiments, this anti-CD20 antibody is referred to as P08A0land is further described in the description of Table 3 below. In embodiments, the anti-CD20 antibody has the amino acid sequence of rituximab, except that the heavy chain CDR3 amino acid sequence is RSTYYGGDWRWR (SEQ ID NO: 625).

[0208] In embodiments, the anti-CD20 antibody includes a heavy chain CDR3 encoded by a nucleotide sequence of CGCAGCACCTATTATGGCGGGTTTTGGTATTTTAAC (SEQ ID NO: 585). In embodiments, the anti-CD20 antibody further includes a heavy chain CDR1 encoded by a nucleotide sequence of TATACCTTCACAAGCTATAAC (SEQ ID NO: 548), and a heavy chain CDR2 encoded by a nucleotide sequence of ATTTATCCGGGCAACGGCGAT (SEQ ID NO: 549). In embodiments, the anti-CD20 antibody further includes a light chain CDR1 encoded by a nucleotide sequence of GCGAGCAGCAGCGTGAGC (SEQ ID NO: 630), a light chain CDR2 encoded by a nucleotide sequence of GGAAGCGGCACCAGC (SEQ ID NO: 631), and a light chain CDR3 encoded by a nucleotide sequence of TGGACCAGCAACCCGCCG (SEQ ID NO: 632). In embodiments, this anti-CD20 antibody is referred to as P08B11 and is further described in the description of Table 3 below. In embodiments, the anti-CD20 antibody is encoded by a nucleic acid sequence that encodes the amino acid sequence of rituximab, except that the heavy chain CDR3 sequence is encoded by a nucleotide sequence of CGCAGCACCTATTATGGCGGGTTTTGGTATTTTAAC (SEQ ID NO: 585).

[0209] In embodiments, the anti-CD20 antibody includes a heavy chain CDR3 amino acid sequence of RSTYYGGFWYFN (SEQ ID NO: 626). In embodiments, the anti-CD20 antibody further includes a heavy chain CDR1 amino acid sequence of YTFTSYN (SEQ ID NO: 589), and a heavy chain CDR2 amino acid sequence of IYPGNGD (SEQ ID NO: 590). In embodiments, the anti-CD20 antibody further includes the light chain CDR1 amino acid sequence of ASSSVS (SEQ ID NO: 633), the light chain CDR2 amino acid sequence of GSGTS (SEQ ID NO: 634), and the light chain CDR3 amino acid of WTSNPP (SEQ ID NO: 635). In embodiments, this anti-CD20 antibody is referred to as P08B11 and is further described in the description of Table 3 below. In embodiments, the anti-CD20 antibody has the amino acid sequence of rituximab, except that the heavy chain CDR3 amino acid sequence is RSTYYGGFWYFN (SEQ ID NO: 626).

[0210] In embodiments, the anti-CD20 antibody includes a heavy chain CDR3 encoded by a nucleotide sequence of CGCAGCACCTATTATGGCGGCGATTGGTCTTGGGCT (SEQ ID NO: 586). In embodiments, the anti-CD20 antibody further includes a heavy chain CDR1 encoded by a nucleotide sequence of TATACCTTCACAAGCTATAAC (SEQ ID NO: 548), and a heavy chain CDR2 encoded by a nucleotide sequence of ATTTATCCGGGCAACGGCGAT (SEQ ID NO: 549). In embodiments, the anti-CD20 antibody further includes a light chain CDR1 encoded by a nucleotide sequence of GCGAGCAGCAGCGTGAGC (SEQ ID NO: 630), a light chain CDR2 encoded by a nucleotide sequence of GGAAGCGGCACCAGC (SEQ ID NO: 631), and a light chain CDR3 encoded by a nucleotide sequence of TGGACCAGCAACCCGCCG (SEQ ID NO: 632). In embodiments, this anti-CD20 antibody is referred to as P08G02 and is further described in the description of Table 3 below. In embodiments, the anti-CD20 antibody is encoded by a nucleic acid sequence that encodes the amino acid sequence of rituximab, except that the heavy chain CDR3 sequence is encoded by a nucleotide sequence of CGCAGCACCTATTATGGCGGCGATTGGTCTTGGGCT (SEQ ID NO: 586).

[0211] In embodiments, the anti-CD20 antibody includes a heavy chain CDR3 amino acid sequence of QSIYYGGDWYFN (SEQ ID NO: 622). In embodiments, the anti-CD20 antibody further includes a heavy chain CDR1 amino acid sequence of YTFTSYN (SEQ ID NO: 589), and a heavy chain CDR2 amino acid sequence of IYPGNGD (SEQ ID NO: 590). In embodiments, the anti-CD20 antibody further includes the light chain CDR1 amino acid sequence of ASSSVS (SEQ ID NO: 633), the light chain CDR2 amino acid sequence of GSGTS (SEQ ID NO: 634), and the light chain CDR3 amino acid of WTSNPP (SEQ ID NO: 635). In embodiments, this anti-CD20 antibody is referred to as P08G02 and is further described in the description of Table 3 below. In embodiments, the anti-CD20 antibody has the amino acid sequence of rituximab, except that the heavy chain CDR3 amino acid sequence is RSTYYGGDWSWA (SEQ ID NO: 627).

[0212] In embodiments, the anti-CD20 antibody includes a heavy chain CDR3 encoded by a nucleotide sequence of CGCAGCACCATGTGTAAGGGCGATTGGTATTTTAAC (SEQ ID NO: 587). In embodiments, the anti-CD20 antibody further includes a heavy chain CDR1 encoded by a nucleotide sequence of TATACCTTCACAAGCTATAAC (SEQ ID NO: 548), and a heavy chain CDR2 encoded by a nucleotide sequence of ATTTATCCGGGCAACGGCGAT (SEQ ID NO: 549). In embodiments, the anti-CD20 antibody further includes a light chain CDR1 encoded by a nucleotide sequence of GCGAGCAGCAGCGTGAGC (SEQ ID NO: 630), a light chain CDR2 encoded by a nucleotide sequence of GGAAGCGGCACCAGC (SEQ ID NO: 631), and a light chain CDR3 encoded by a nucleotide sequence of TGGACCAGCAACCCGCCG (SEQ ID NO: 632). In embodiments, this anti-CD20 antibody is referred to as P07A06 and is further described in the description of Table 3 below. In embodiments, the anti-CD20 antibody is encoded by a nucleic acid sequence that encodes the amino acid sequence of rituximab, except that the heavy chain CDR3 sequence is encoded by a nucleotide sequence of CGCAGCACCATGTGTAAGGGCGATTGGTATTTTAAC (SEQ ID NO: 587).

[0213] In embodiments, the anti-CD20 antibody includes a heavy chain CDR3 amino acid sequence of RSTMCKGDWYFN (SEQ ID NO: 628)). In embodiments, the anti-CD20 antibody further includes a heavy chain CDR1 amino acid sequence of YTFTSYN (SEQ ID NO: 589), and a heavy chain CDR2 amino acid sequence of IYPGNGD (SEQ ID NO: 590). In embodiments, the anti-CD20 antibody further includes the light chain CDR1 amino acid sequence of ASSSVS (SEQ ID NO: 633), the light chain CDR2 amino acid sequence of GSGTS (SEQ ID NO: 634), and the light chain CDR3 amino acid of WTSNPP (SEQ ID NO: 635). In embodiments, this anti-CD20 antibody is referred to as P07A06 and is further described in the description of Table 3 below. In embodiments, the anti-CD20 antibody has the amino acid sequence of rituximab, except that the heavy chain CDR3 amino acid sequence is RSTMCKGDWYFN (SEQ ID NO: 628).

[0214] In embodiments, the anti-CD20 antibody includes a heavy chain CDR3 encoded by a nucleotide sequence of CGCAGCACCATGTTGGGTGGCGATTGGTATTTTAAC (SEQ ID NO: 588). In embodiments, the anti-CD20 antibody further includes a heavy chain CDR1 encoded by a nucleotide sequence of TATACCTTCACAAGCTATAAC (SEQ ID NO: 548), and a heavy chain CDR2 encoded by a nucleotide sequence of ATTTATCCGGGCAACGGCGAT (SEQ ID NO: 549). In embodiments, the anti-CD20 antibody further includes a light chain CDR1 encoded by a nucleotide sequence of GCGAGCAGCAGCGTGAGC (SEQ ID NO: 630), a light chain CDR2 encoded by a nucleotide sequence of GGAAGCGGCACCAGC (SEQ ID NO: 631), and a light chain CDR3 encoded by a nucleotide sequence of TGGACCAGCAACCCGCCG (SEQ ID NO: 632). In embodiments, this anti-CD20 antibody is referred to as P08E05 and is further described in the description of Table 3 below. In embodiments, the anti-CD20 antibody is encoded by a nucleic acid sequence that encodes the amino acid sequence of rituximab, except that the heavy chain CDR3 sequence is encoded by a nucleotide sequence of CGCAGCACCATGTTGGGTGGCGATTGGTATTTTAAC (SEQ ID NO: 588).

[0215] In embodiments, the anti-CD20 antibody includes a heavy chain CDR3 amino acid sequence of RSTMLGGDWYFN (SEQ ID NO: 629). In embodiments, the anti-CD20 antibody further includes a heavy chain CDR1 amino acid sequence of YTFTSYN (SEQ ID NO: 589), and a heavy chain CDR2 amino acid sequence of IYPGNGD (SEQ ID NO: 590). In embodiments, the anti-CD20 antibody further includes the light chain CDR1 amino acid sequence of ASSSVS (SEQ ID NO: 633), the light chain CDR2 amino acid sequence of GSGTS (SEQ ID NO: 634), and the light chain CDR3 amino acid of WTSNPP (SEQ ID NO: 635). In embodiments, this anti-CD20 antibody is referred to as P08E05and is further described in the description of Table 3 below. In embodiments, the anti-CD20 antibody has the amino acid sequence of rituximab, except that the heavy chain CDR3 amino acid sequence is RSTMLGGDWYFN (SEQ ID NO: 629).

### IV. Expression Systems

[0216] In an aspect, provided herein is an isolated nucleic acid encoding a recombinant protein as described herein.

[0217] In embodiments, provided herein is an isolated nucleic acid encoding a recombinant protein that includes a Type I transmembrane domain and an immunoglobulin G (IgG) antibody, where the transmembrane domain is fused to the C-terminus of the IgG antibody and where the recombinant protein is resistant to cleavage by a protease. In embodiments, provided herein is isolated nucleic acid encoding a recombinant protein that includes a Type I transmembrane domain and an immunoglobulin G (IgG) antibody, where the transmembrane domain is fused to the C-terminus of the IgG antibody and where the recombinant protein includes an Fc region with a dissociation constant of about 1×10⁻⁵ M to about 1×10⁻¹³ M to one or more of CD32 (FcγRII), CD16 (FcγRIII), and CD64 (FcγRI).

[0218] In embodiments, provided herein is an expression vector including an isolated nucleic acid encoding a recombinant protein that includes a Type I transmembrane domain and an immunoglobulin G (IgG) antibody, where the transmembrane domain is fused to the C-terminus of the IgG antibody and where the recombinant protein is resistant to cleavage by a protease. In embodiments, provided herein is an expression vector including an isolated nucleic acid encoding a recombinant protein that includes a Type I transmembrane domain and an immunoglobulin G (IgG) antibody, where the transmembrane domain is fused to the C-terminus of the IgG antibody and where the recombinant protein includes an Fc region with a dissociation constant of about 1×10⁻⁵ M to about 1×10⁻¹³ M to one or more of CD32 (FcγRII), CD16 (FcγRIII), and CD64 (FcγRI).

[0219] In embodiments, provided herein is a cell containing an expression vector as described. Specifically, provided herein is a cell containing an expression vector that includes an isolated nucleic acid encoding a recombinant protein that includes a Type I transmembrane domain and an immunoglobulin G (IgG) antibody, where the transmembrane domain is fused to the C-terminus of the IgG antibody and where the recombinant protein is resistant to cleavage by a protease. Specifically, provided herein is a cell containing an expression vector that includes an isolated nucleic acid encoding a recombinant protein that includes a Type I transmembrane domain and an immunoglobulin G (IgG) antibody, where the transmembrane domain is fused to the C-terminus of the IgG antibody and where the recombinant protein includes an Fc region with a dissociation constant of about 1×10⁻⁵ M to about 1×10⁻¹³ M to one or more of CD32 (FcγRII), CD16 (FcγRIII), and CD64 (FcγRI). In embodiments, the cell is a mammalian cell. In embodiments, the mammalian cell is a Chinese hamster ovary (CHO) cell. In embodiments, an IgG antibody encoded by an expression vector as described is expressed on the surface of a cell. In embodiments, an IgG antibody encoded by an expression vector as described is expressed on the surface of a Chinese hamster ovary (CHO) cell.

### V. Methods of Use

[0220] In an aspect, provided herein are methods of binding a ligand to a cell surface recombinant protein, the method including contacting a ligand with a cell surface recombinant protein, where the cell surface recombinant protein includes a Type I transmembrane domain, an immunoglobulin G (IgG) antibody, where the Type I transmembrane domain is fused to the C-terminus of the IgG antibody, and where the IgG antibody is capable of binding a ligand, and further where the cell surface protein is resistant to cleavage by a protease or has higher binding affinity for one or more of CD32 (FcγRII), CD16 (FcγRIII), and CD64 (FcγRI).

[0221] In embodiments of a method of binding a ligand to a cell surface protein, the cell is a CHO cell. In embodiments of a method of binding a ligand to a CHO cell surface protein, the protein is a recombinant protein as described herein. In embodiments of a method of binding a ligand to a CHO cell surface protein, the surface protein is a recombinant protein including a Type I transmembrane domain and an immunoglobulin G (IgG) antibody and where the transmembrane domain is fused to the C-terminus of the IgG antibody. In embodiments of a method of binding a ligand to a CHO cell surface protein, the recombinant protein is resistant to cleavage by a protease. In embodiments of a method of binding a ligand to a CHO cell surface protein, the recombinant protein has higher binding affinity for one or more of CD32 (FcγRII), CD16 (FcγRIII), and CD64 (FcγRI).

[0222] In embodiments of a method of binding a ligand to a cell surface protein, the Type I transmembrane domain is capable of dimerization. In embodiments, the Type I transmembrane domain is selected from an EGFR, PDGFR-alpha, PDGFR-beta, HER2, HER3, HER4, FGFR1, FGFR2, FGFR3, FGFR4, VEGFR1, VEGFR2, VEGFR3, Trk-A, Trk-B, Trk-C, and insulin receptor transmembrane domain. In embodiments, the Type I transmembrane domain is an EGFR transmembrane domain. In embodiments, the Type I transmembrane domain is a PDGFR-alpha transmembrane domain. In embodiments, the Type I transmembrane domain is a PDGFR-beta transmembrane domain. In embodiments, the Type I transmembrane domain is an HER2 transmembrane domain. In embodiments, the Type I transmembrane domain is an HER3 transmembrane domain. In embodiments, the Type I transmembrane domain is an HER4 transmembrane domain. In embodiments, the Type I transmembrane domain is an FGFR1 transmembrane domain. In embodiments, the Type I transmembrane domain is an FGFR2 transmembrane domain. In embodiments, the Type I transmembrane domain is an FGFR3 transmembrane domain. In embodiments, the Type I transmembrane domain is an FGFR4 transmembrane domain. In embodiments, the Type I transmembrane domain is a VEGFR1 transmembrane domain. In embodiments, the Type I transmembrane domain is a VEGFR2 transmembrane domain. In embodiments, the Type I transmembrane domain is a VEGFR3 transmembrane domain. In embodiments, the Type I transmembrane domain is a Trk-A transmembrane domain. In embodiments, the Type I transmembrane domain is a Trk-B transmembrane domain. In embodiments, the Type I transmembrane domain is a Trk-C transmembrane domain. In embodiments, the Type I transmembrane domain is an insulin receptor transmembrane domain.

[0223] In embodiments of a method of binding a ligand to a cell surface protein, the recombinant protein includes an IgG antibody selected from IgG1, IgG2, IgG3, and IgG4. In embodiments, the IgG antibody is IgG1 antibody. In embodiments, the IgG antibody is IgG2 antibody. In embodiments, the IgG antibody is IgG3 antibody. In embodiments, the IgG antibody is IgG4 antibody.

[0224] In embodiments of a method of binding a ligand to a cell surface protein, the IgG antibody includes a protease resistant sequence resistant to cleavage by a protease. In embodiments, the protease is an IgG specific protease. In embodiments, the IgG specific protease is selected from IdeS and IdeZ. In embodiments, the IgG antibody includes a protease resistant sequence resistant to cleavage by IdeS protease. In embodiments, the IgG antibody includes a protease resistant sequence resistant to cleavage by IdeZ protease.

[0225] In embodiments of a method of binding a ligand to a cell surface protein, the IgG antibody includes a protease resistant sequence resistant to cleavage by a protease specific for an ELLGGPS amino acid sequence (SEQ ID NO: 544). In embodiments, the ELLGGPS amino acid sequence specific protease, includes but is not limited to, pepsin, matrix metalloproteinase 7 (MMP7), matrix metalloproteinase 3 (MMP3), matrix metalloproteinase (MMP12), cathepsin G, and glutamyl endopeptidase V8 (GluV8). In embodiments, the IgG antibody includes a protease resistant sequence resistant to cleavage by pepsin. In embodiments, the IgG antibody includes a protease resistant sequence resistant to cleavage by matrix metalloproteinase 7 (MMP7). In embodiments, the IgG antibody includes a protease resistant sequence resistant to cleavage by matrix metalloproteinase 3 (MMP3). In embodiments, the IgG antibody includes a protease resistant sequence resistant to cleavage by matrix metalloproteinase (MMP12). In embodiments, the IgG antibody includes a protease resistant sequence resistant to cleavage by cathepsin G. In embodiments, the IgG antibody includes a protease resistant sequence resistant to cleavage by glutamyl endopeptidase V8 (GluV8).

[0226] In embodiments of a method of binding a ligand to a CHO cell surface protein, the recombinant protein has higher binding affinity for one or more of CD32 (FcγRII), CD16 (FcγRIII), and CD64 (FcγRI) and the recombinant protein includes an Fc region with a dissociation constant of about 1×10⁻⁵ M to about 1×10⁻¹³ M to one or more of CD32 (FcγRII), CD16 (FcγRIII), and CD64 (FcγRI) as described above.

[0227] In an aspect, provided herein is a method of treating cancer in a patient including administering a therapeutic IgG antibody and an IgG specific protease, where the therapeutic IgG antibody is resistant to an IgG specific protease.

[0228] Embodiments of the methods of treating cancer include a therapeutic IgG antibody, where the therapeutic IgG antibody for treating cancer is an antibody with any of the antibody characteristics described herein.

[0229] Embodiments of the methods of treating cancer include a therapeutic IgG antibody, where the therapeutic IgG antibody includes an IgG antibody selected from IgG1, IgG2, IgG3, and IgG4. In embodiments, the therapeutic IgG antibody is IgG1 antibody. In embodiments, the therapeutic IgG antibody is IgG2 antibody. In embodiments, the therapeutic IgG antibody is IgG3 antibody. In embodiments, the IgG antibody is IgG4 antibody.

[0230] Embodiments of the methods of treating cancer include a therapeutic IgG antibody, where the therapeutic IgG antibody includes an Fc (fragment crystallizable) region, a Fab (antigen-binding fragment) region, and a hinge region. In embodiments, the therapeutic IgG antibody includes an Fc (fragment crystallizable) region. In embodiments, the therapeutic IgG antibody includes a Fab (garment crystallizable) region. In embodiments, the therapeutic IgG antibody includes an Fc (antigen-binding fragment) region. In embodiments, the therapeutic IgG antibody includes a hinge region.

[0231] Embodiments of the methods of treating cancer include a therapeutic IgG antibody, where the therapeutic IgG antibody includes a Fab region that is identical to the Fab region of any one of Abciximab, Adalimumab, Alemtuzumab, Alemtuzumab, Alirocumab, Arcitumomab, Atezolizumab, Avelumab, Basiliximab, Belimumab, Besilesomab, Bevacizumab, Bevacizumab, Bezlotoxumab, Brentuximab, Brodalumab, Canakinumab, Capromab, Catumaxomab, Certolizumab pegol, Cetuximab, Daratumumab, Denosumab, Dinutuximab, Dupilumab, Durvalumab, Eculizumab, Efalizumab, Elotuzumab, Fanolesomab, Gemtuzumab ozogamicin, Golimumab, Ibritumomab tiuxetan, Idarucizumab, Imiciromab, Infliximab, Ipilimumab, Mepolizumab, Muromonab-CD3, Natalizumab, Necitumumab, Nivolumab, Nofetumomab, Obiltoxaximab, Obinutuzumab, Ocrelizumab, Ofatumumab, Olaratumab, Omalizumab, Palivizumab, Panitumumab, Pembrolizumab, Pertuzumab, Ramucirumab, Ranibizumab, Raxibacumab, Reslizumab, Rituximab, Satumomab, Secukinumab, Siltuximab, Sulesomab, Tocilizumab, Tositumomab, Trastuzumab, Trastuzumab emtansine, Ustekinumab, Vedolizumab, Volocumab, and Votumumab. In embodiments, the therapeutic IgG antibody includes a Fab region that is identical to the Fab region of Abciximab. In embodiments, the therapeutic IgG antibody includes a Fab region that is identical to the Fab region of Adalimumab. In embodiments, the therapeutic IgG antibody includes a Fab region that is identical to the Fab region of Alemtuzumab. In embodiments, the therapeutic IgG antibody includes a Fab region that is identical to the Fab region of Alemtuzumab. In embodiments, the therapeutic IgG antibody includes a Fab region that is identical to the Fab region of Alirocumab. In embodiments, the therapeutic IgG antibody includes a Fab region that is identical to the Fab region of Arcitumomab. In embodiments, the therapeutic IgG antibody includes a Fab region that is identical to the Fab region of Atezolizumab. In embodiments, the therapeutic IgG antibody includes a Fab region that is identical to the Fab region of Avelumab. In embodiments, the therapeutic IgG antibody includes a Fab region that is identical to the Fab region of Basiliximab. In embodiments, the therapeutic IgG antibody includes a Fab region that is identical to the Fab region of Belimumab. In embodiments, the therapeutic IgG antibody includes a Fab region that is identical to the Fab region of Besilesomab. In embodiments, the therapeutic IgG antibody includes a Fab region that is identical to the Fab region of Bevacizumab. In embodiments, the therapeutic IgG antibody includes a Fab region that is identical to the Fab region of Bezlotoxumab. In embodiments, the therapeutic IgG antibody includes a Fab region that is identical to the Fab region of Brentuximab. In embodiments, the therapeutic IgG antibody includes a Fab region that is identical to the Fab region of Brodalumab. In embodiments, the therapeutic IgG antibody includes a Fab region that is identical to the Fab region of Canakinumab. In embodiments, the I therapeutic gG antibody includes a Fab region that is identical to the Fab region of Capromab. In embodiments, the therapeutic IgG antibody includes a Fab region that is identical to the Fab region of Catumaxomab. In embodiments, the therapeutic IgG antibody includes a Fab region that is identical to the Fab region of Certolizumab pegol. In embodiments, the therapeutic IgG antibody includes a Fab region that is identical to the Fab region of Cetuximab. In embodiments, the therapeutic IgG antibody includes a Fab region that is identical to the Fab region of Daratumumab. In embodiments, the therapeutic IgG antibody includes a Fab region that is identical to the Fab region of Denosumab. In embodiments, the therapeutic IgG antibody includes a Fab region that is identical to the Fab region of Dinutuximab. In embodiments, the therapeutic IgG antibody includes a Fab region that is identical to the Fab region of Dupilumab. In embodiments, the therapeutic IgG antibody includes a Fab region that is identical to the Fab region of Durvalumab. In embodiments, the therapeutic IgG antibody includes a Fab region that is identical to the Fab region of Eculizumab. In embodiments, the therapeutic IgG antibody includes a Fab region that is identical to the Fab region of Efalizumab. In embodiments, the therapeutic IgG antibody includes a Fab region that is identical to the Fab region of Elotuzumab. In embodiments, the therapeutic IgG antibody includes a Fab region that is identical to the Fab region of Fanolesomab. In embodiments, the therapeutic IgG antibody includes a Fab region that is identical to the Fab region of Gemtuzumab ozogamicin. In embodiments, the therapeutic IgG antibody includes a Fab region that is identical to the Fab region of Golimumab. In embodiments, the therapeutic IgG antibody includes a Fab region that is identical to the Fab region of Ibritumomab tiuxetan. In embodiments, the therapeutic IgG antibody includes a Fab region that is identical to the Fab region of Idarucizumab. In embodiments, the therapeutic IgG antibody includes a Fab region that is identical to the Fab region of Imiciromab. In embodiments, the therapeutic IgG antibody includes a Fab region that is identical to the Fab region of Infliximab. In embodiments, the therapeutic IgG antibody includes a Fab region that is identical to the Fab region of Ipilimumab. In embodiments, the therapeutic IgG antibody includes a Fab region that is identical to the Fab region of Mepolizumab. In embodiments, the therapeutic IgG antibody includes a Fab region that is identical to the Fab region of Muromonab-CD3. In embodiments, the therapeutic IgG antibody includes a Fab region that is identical to the Fab region of Natalizumab. In embodiments, the therapeutic IgG antibody includes a Fab region that is identical to the Fab region of Necitumumab. In embodiments, the therapeutic IgG antibody includes a Fab region that is identical to the Fab region of Nivolumab. In embodiments, the therapeutic IgG antibody includes a Fab region that is identical to the Fab region of Nofetumomab. In embodiments, the therapeutic IgG antibody includes a Fab region that is identical to the Fab region of Obiltoxaximab. In embodiments, the therapeutic IgG antibody includes a Fab region that is identical to the Fab region of Obinutuzumab. In embodiments, the therapeutic IgG antibody includes a Fab region that is identical to the Fab region of Ocrelizumab. In embodiments, the therapeutic IgG antibody includes a Fab region that is identical to the Fab region of Ofatumumab. In embodiments, the therapeutic IgG antibody includes a Fab region that is identical to the Fab region of Olaratumab. In embodiments, the therapeutic IgG antibody includes a Fab region that is identical to the Fab region of Omalizumab. In embodiments, the therapeutic IgG antibody includes a Fab region that is identical to the Fab region of Palivizumab. In embodiments, the therapeutic IgG antibody includes a Fab region that is identical to the Fab region of Panitumumab. In embodiments, the therapeutic IgG antibody includes a Fab region that is identical to the Fab region of Pembrolizumab. In embodiments, the therapeutic IgG antibody includes a Fab region that is identical to the Fab region of Pertuzumab. In embodiments, the therapeutic IgG antibody includes a Fab region that is identical to the Fab region of Ramucirumab. In embodiments, the therapeutic IgG antibody includes a Fab region that is identical to the Fab region of Ranibizumab. In embodiments, the therapeutic IgG antibody includes a Fab region that is identical to the Fab region of Raxibacumab. In embodiments, the therapeutic IgG antibody includes a Fab region that is identical to the Fab region of Reslizumab. In embodiments, the therapeutic IgG antibody includes a Fab region that is identical to the Fab region of Rituximab. In embodiments, the therapeutic IgG antibody includes a Fab region that is identical to the Fab region of Satumomab. In embodiments, the therapeutic IgG antibody includes a Fab region that is identical to the Fab region of Secukinumab. In embodiments, the therapeutic IgG antibody includes a Fab region that is identical to the Fab region of Siltuximab. In embodiments, the therapeutic IgG antibody includes a Fab region that is identical to the Fab region of Sulesomab. In embodiments, the therapeutic IgG antibody includes a Fab region that is identical to the Fab region of Tocilizumab. In embodiments, the therapeutic IgG antibody includes a Fab region that is identical to the Fab region of Tositumomab. In embodiments, the therapeutic IgG antibody includes a Fab region that is identical to the Fab region of Trastuzumab. In embodiments, the therapeutic IgG antibody includes a Fab region that is identical to the Fab region of Trastuzumab emtansine. In embodiments, the therapeutic IgG antibody includes a Fab region that is identical to the Fab region of Ustekinumab. In embodiments, the therapeutic IgG antibody includes a Fab region that is identical to the Fab region of Vedolizumab. In embodiments, the therapeutic IgG antibody includes a Fab region that is identical to the Fab region of Volocumab. In embodiments, the therapeutic IgG antibody includes a Fab region that is identical to the Fab region of Votumumab.

[0232] Embodiments of the methods of treating cancer include a therapeutic IgG antibody, where the therapeutic IgG antibody includes a hinge region that includes a protease resistant sequence. In embodiments, the sequence is between amino acid positions 246-252 according to Kabat numbering. In embodiments, the sequence is between positions corresponding to Kabat positions 246-252. In embodiments, the protease resistant sequence is two or more amino acids in length. In embodiments, the protease resistant sequence is three amino acids in length. In embodiments, the protease resistant sequence is four amino acids in length. In embodiments, the protease resistant sequence is five amino acids in length. In embodiments, the protease resistant sequence is six amino acids in length. In embodiments, the protease resistant sequence is seven amino acids in length. In embodiments, the protease resistant sequence includes the amino acids of SEQ ID NO: 546. In embodiments, the protease resistant sequence includes the amino acids of SEQ ID NO: 545. In embodiments, the protease resistant sequence includes the amino acids of SEQ ID NO: 547.

[0233] Embodiments of the methods of treating cancer include a therapeutic IgG antibody, where the therapeutic IgG antibody hinge region is two amino acids in length and includes an amino acid sequence of DW, YD, QW, QE, PW, QD, or DD. In embodiments, the therapeutic IgG antibody hinge region is three amino acids in length and includes an amino acid sequence of XDW, XDW, XYD, XQW, XQE, XPW, XQD, or XDD, where X is any amino acid. In embodiments, the therapeutic IgG antibody hinge region is four amino acids in length and includes an amino acid sequence of XXDW, XXDW, XXYD, XXQW, XXQE, XXPW, XXQD, or XXDD, where X is any amino acid. In embodiments, the therapeutic IgG antibody hinge region is five amino acids in length and includes an amino acid sequence of XXXDW, XXXYD, XXXQW, XXXQE, XXXPW, XXXQD, or XXXDD, where X is any amino acid. In embodiments, the therapeutic IgG antibody hinge region is six amino acids in length and includes an amino acid sequence of XXXXDW, XXXXYD, XXXXQW, XXXXQE, XXXXPW, XXXXQD, or XXXXDD, where X is any amino acid. In embodiments, the therapeutic IgG antibody hinge region is seven amino acids in length and includes an amino acid sequence of XXXXXDW, XXXXXYD, XXXXXQW, XXXXXQE, XXXXXPW, XXXXXQD, or XXXXXDD, where X is any amino acid. In embodiments, the therapeutic IgG antibody hinge region is eight amino acids in length and includes an amino acid sequence of XXXXXXDW, XXXXXXYD, XXXXXXQW, XXXXXXQE, XXXXXXPW, XXXXXXQD, or XXXXXXDD, where X is any amino acid. In embodiments, the therapeutic IgG antibody hinge region is nine amino acids in length and includes an amino acid sequence of XXXXXXXDW, XXXXXXXYD, XXXXXXXQW, XXXXXXXQE, XXXXXXXPW, XXXXXXXQD, or XXXXXXXDD, where X is any amino acid. In embodiments, the therapeutic IgG antibody hinge region includes an amino acid sequence of XCWDW, XXCWDW, XXXCWDW, XXXXXCWDW, XXXXXCWDW, XXXXXXCWDW, XXXXXXXCWDW, ETCWDW, DSCWDW, YDCWDW, DDCWDW, DMCWDW, EHCWDW, IICWDW, DVCWDW, EFCWDW, FNCWDW, EETCWDW, EDSCWDW, EETCWDD, or EETQWDD where X is any amino acid.

[0234] Embodiments of the methods of treating cancer include a therapeutic IgG antibody, where the therapeutic IgG antibody includes a hinge region that includes DW, YD, QW, QE, PW, QD, DD, CWDW, ETCWDW, DSCWDW, YDCWDW, DDCWDW, DMCWDW, EHCWDW, IICWDW, DVCWDW, EFCWDW, FNCWDW, EETCWDW (SEQ ID NO: 545), EDSCWDW (SEQ ID NO: 547), EETCWDD, EETCWSW (SEQ ID NO: 547), EETQWDD. In some aspects, the variants or homologs have one, two, three, four, five or six amino acid sequence identity.

[0235] Embodiments of the methods of treating cancer include a therapeutic IgG antibody, where the therapeutic IgG antibody includes a protease resistant sequence resistant to cleavage by a protease. In embodiments, the protease is an IgG specific protease. In embodiments, the IgG specific protease is selected from IdeS and IdeZ. In embodiments, the therapeutic IgG antibody includes a protease resistant sequence resistant to cleavage by IdeS protease. In embodiments, the therapeutic IgG antibody includes a protease resistant sequence resistant to cleavage by IdeZ protease.

[0236] Embodiments of the methods of treating cancer include a therapeutic IgG antibody, where the therapeutic IgG antibody includes a protease resistant sequence resistant to cleavage by a protease specific for an ELLGGPS amino acid sequence (SEQ ID NO: 544). In embodiments, the ELLGGPS amino acid sequence specific protease, includes but is not limited to, pepsin, matrix metalloproteinase 7 (MMP7), matrix metalloproteinase 3 (MMP3), matrix metalloproteinase (MMP12), cathepsin G, and glutamyl endopeptidase V8 (GluV8). In embodiments, the therapeutic IgG antibody includes a protease resistant sequence resistant to cleavage by pepsin. In embodiments, the therapeutic IgG antibody includes a protease resistant sequence resistant to cleavage by matrix metalloproteinase 7 (MMP7). In embodiments, the therapeutic IgG antibody includes a protease resistant sequence resistant to cleavage by matrix metalloproteinase 3 (MMP3). In embodiments, the therapeutic IgG antibody includes a protease resistant sequence resistant to cleavage by matrix metalloproteinase (MMP12). In embodiments, the therapeutic IgG antibody includes a protease resistant sequence resistant to cleavage by cathepsin G. In embodiments, the therapeutic IgG antibody includes a protease resistant sequence resistant to cleavage by glutamyl endopeptidase V8 (GluV8).

[0237] Embodiments of the methods of treating cancer include a therapeutic IgG antibody, where the Fc region of the therapeutic IgG antibody has a dissociation constant of about 1×10⁻⁵ M to about 1×10⁻¹³ M to one or more of CD20, CD32 (FcγRII), CD16 (FcγRIII), and CD64 (FcγRI). RI). In embodiments, the Fc region of the therapeutic IgG antibody has a dissociation constant of about 1×10⁻⁵ M to about 1×10⁻¹² M, about 1×10⁻⁵ M to about 1×10⁻¹¹ M, about 1×10⁻⁵ M to about 1×10⁻¹⁰ M, about 1×10⁻⁵ M to about 1×10⁻⁹ M, about 1×10⁻⁵ M to about 1×10⁻⁸ M, about 1×10⁻⁵ M to about 1×10⁻⁷ M, about 1×10⁻⁵ M to about 1×10⁻⁶ M, about 1×10⁻⁶ M to about 1×10⁻¹³ M, about 1×10⁻⁶ M to about 1×10⁻¹² M, about 1×10⁻⁶ M to about 1×10⁻¹¹ M, about 1×10⁻⁶ M to about 1×10⁻¹⁰ M, about 1×10⁻⁶ M to about 1×10⁻⁹ M, about 1×10⁻⁶ M to about 1×10⁻⁸ M, about 1×10⁻⁶ M to about 1×10⁻⁷ M, about 1×10⁻⁷ M to about 1×10⁻¹³ M, about 1×10⁻⁷ M to about 1×10⁻¹² M, about 1×10⁻⁷ M to about 1×10⁻¹¹ M, about 1×10⁻⁷ M to about 1×10⁻¹⁰ M, about 1×10⁻⁷ M to about 1×10⁻⁹ M, about 1×10⁻⁷ M to about 1×10⁻⁸ M, about 1×10⁻⁸ M to about 1×10⁻¹³ M, about 1×10⁻⁸ M to about 1×10⁻¹² M, about 1×10⁻⁸ M to about 1×10⁻¹¹ M, about 1×10⁻⁸ M to about 1×10⁻¹⁰ M, about 1×10⁻⁸ M to about 1×10⁻⁹ M, about 1×10⁻⁹ M to about 1×10⁻¹³ M, about 1×10⁻⁹ M to about 1×10⁻¹² M, about 1×10⁻⁹ M to about 1×10⁻¹¹ M, about 1×10⁻⁹ M to about 1×10⁻¹⁰ M, about 1×10⁻¹⁰ M to about 1×10⁻¹³ M, about 1×10⁻¹⁰ M to about 1×10⁻¹² M, about 1×10⁻¹⁰ M to about 1×10⁻¹¹ M, about 1×10⁻¹¹ M to about 1×10⁻¹³ M, about 1×10⁻¹¹ M to about 1×10⁻¹² M, or about 1×10⁻¹² M to about 1×10⁻¹³ M to one or more of CD32 (FcγRII), CD16 (FcγRIII), and CD64 (FcγRI). In embodiments, the therapeutic IgG antibody has a dissociation constant of about 1×10⁻⁵ M, about 1×10⁻⁶ M, about 1×10⁻⁷ M, about 1×10⁻⁸ M, about 1×10⁻⁹ M, about 1×10⁻¹⁰ M, about 1×10⁻¹¹ M, about 1×10⁻¹² M, or about 1×10⁻¹³ M to one or more of CD32 (FcγRII), CD16 (FcγRIII), and CD64 (FcγRI).

[0238] Embodiments of the methods of treating cancer include a therapeutic IgG antibody, where the Fc region of the therapeutic IgG antibody has a dissociation constant of about 1×10⁻⁵ M to about 1×10⁻¹³ M to CD32 (FcγRII). In embodiments, the Fc region of the therapeutic IgG antibody has a dissociation constant of about 1×10⁻⁵ M to about 1×10⁻¹² M, about 1×10⁻⁵ M to about 1×10⁻¹¹ M, about 1×10⁻⁵ M to about 1×10⁻¹⁰ M, about 1×10⁻⁵ M to about 1×10⁻⁹ M, about 1×10⁻⁵ M to about 1×10⁻⁸ M, about 1×10⁻⁵ M to about 1×10⁻⁷ M, about 1×10⁻⁵ M to about 1×10⁻⁶ M, about 1×10⁻⁶ M to about 1×10⁻¹³ M, about 1×10⁻⁶ M to about 1×10⁻¹² M, about 1×10⁻⁶ M to about 1×10⁻¹¹ M, about 1×10⁻⁶ M to about 1×10⁻¹⁰ M, about 1×10⁻⁶ M to about 1×10⁻⁹ M, about 1×10⁻⁶ M to about 1×10⁻⁸ M, about 1×10⁻⁶ M to about 1×10⁻⁷ M, about 1×10⁻⁷ M to about 1×10⁻¹³ M, about 1×10⁻⁷ M to about 1×10⁻¹² M, about 1×10⁻⁷ M to about 1×10⁻¹¹ M, about 1×10⁻⁷ M to about 1×10⁻¹⁰ M, about 1×10⁻⁷ M to about 1×10⁻⁹ M, about 1×10⁻⁷ M to about 1×10⁻⁸ M, about 1×10⁻⁸ M to about 1×10⁻¹³ M, about 1×10⁻⁸ M to about 1×10⁻¹² M, about 1×10⁻⁸ M to about 1×10⁻¹¹ M, about 1×10⁻⁸ M to about 1×10⁻¹⁰ M, about 1×10⁻⁸ M to about 1×10⁻⁹ M, about 1×10⁻⁹ M to about 1×10⁻¹³ M, about 1×10⁻⁹ M to about 1×10⁻¹² M, about 1×10⁻⁹ M to about 1×10⁻¹¹ M, about 1×10⁻⁹ M to about 1×10⁻¹⁰ M, about 1×10⁻¹⁰ M to about 1×10⁻¹³ M, about 1×10⁻¹⁰ M to about 1×10⁻¹² M, about 1×10⁻¹⁰ M to about 1×10⁻¹¹ M, about 1×10⁻¹¹ M to about 1×10⁻¹³ M, about 1×10⁻¹¹ M to about 1×10⁻¹² M, or about 1×10⁻¹² M to about 1×10⁻¹³ M to CD32 (FcγRII). In embodiments, the Fc region of the therapeutic IgG antibody has a dissociation constant of about 1×10⁻⁵ M, about 1×10⁻⁶ M, about 1×10⁻⁷ M, about 1×10⁻⁸ M, about 1×10⁻⁹ M, about 1×10⁻¹⁰ M, about 1×10⁻¹¹ M, about 1×10⁻¹² M, or about 1×10⁻¹³ M to CD32 (FcγRII). In embodiments, the therapeutic IgG antibody has a dissociation constant of about 1×10⁻⁵ M to CD32 (FcγRII). In embodiments, the Fc region of the therapeutic IgG antibody has a dissociation constant of about 1×10⁻⁶ M to CD32 (FcγRII). In embodiments, the Fc region of the therapeutic IgG antibody has a dissociation constant of about 1×10⁻⁷ M to CD32 (FcγRII). In embodiments, the Fc region of the therapeutic IgG antibody has a dissociation constant of about 1×10⁻⁸ M to CD32 (FcγRII). In embodiments, the Fc region of the therapeutic IgG antibody has a dissociation constant of about 1×10⁻⁹ M to CD32 (FcγRII). In embodiments, the Fc region of the therapeutic IgG antibody has a dissociation constant of about 1×10⁻¹⁰ M to CD32 (FcγRII). In embodiments, the Fc region of the therapeutic IgG antibody has a dissociation constant of about 1×10⁻¹¹ M to CD32 (FcγRII). In embodiments, the Fc region of the therapeutic IgG antibody has a dissociation constant of about 1×10⁻¹² M to CD32 (FcγRII). In embodiments, the Fc region of the therapeutic IgG antibody has a dissociation constant of about 1×10⁻¹³ M to CD32 (FcγRII).

[0239] Embodiments of the methods of treating cancer include a therapeutic IgG antibody, where the Fc region of the therapeutic IgG antibody has a dissociation constant of about 1×10⁻⁵ M to about 1×10⁻¹³ M to CD16 (FcγRIII). In embodiments, the therapeutic IgG antibody has a dissociation constant of about 1×10⁻⁵ M to about 1×10⁻¹³ M to CD16 (FcγRIII). In embodiments, the Fc region of the therapeutic IgG antibody has a dissociation constant of about 1×10⁻⁵ M to about 1×10⁻¹² M, about 1×10⁻⁵ M to about 1×10⁻¹¹ M, about 1×10⁻⁵ M to about 1×10⁻¹⁰ M, about 1×10⁻⁵ M to about 1×10⁻⁹ M, about 1×10⁻⁵ M to about 1×10⁻⁸ M, about 1×10⁻⁵ M to about 1×10⁻⁷ M, about 1×10⁻⁵ M to about 1×10⁻⁶ M, about 1×10⁻⁶ M to about 1×10⁻¹³ M, about 1×10⁻⁶ M to about 1×10⁻¹² M, about 1×10⁻⁶ M to about 1×10⁻¹¹ M, about 1×10⁻⁶ M to about 1×10⁻¹⁰ M, about 1×10⁻⁶ M to about 1×10⁻⁹ M, about 1×10⁻⁶ M to about 1×10⁻⁸ M, about 1×10⁻⁶ M to about 1×10⁻⁷ M, about 1×10⁻⁷ M to about 1×10⁻¹³ M, about 1×10⁻⁷ M to about 1×10⁻¹² M, about 1×10⁻⁷ M to about 1×10⁻¹¹ M, about 1×10⁻⁷ M to about 1×10⁻¹⁰ M, about 1×10⁻⁷ M to about 1×10⁻⁹ M, about 1×10⁻⁷ M to about 1×10⁻⁸ M, about 1×10⁻⁸ M to about 1×10⁻¹³ M, about 1×10⁻⁸ M to about 1×10⁻¹² M, about 1×10⁻⁸ M to about 1×10⁻¹¹ M, about 1×10⁻⁸ M to about 1×10⁻¹⁰ M, about 1×10⁻⁸ M to about 1×10⁻⁹ M, about 1×10⁻⁹ M to about 1×10⁻¹³ M, about 1×10⁻⁹ M to about 1×10⁻¹² M, about 1×10⁻⁹ M to about 1×10⁻¹¹ M, about 1×10⁻⁹ M to about 1×10⁻¹⁰ M, about 1×10⁻¹⁰ M to about 1×10⁻¹³ M, about 1×10⁻¹⁰ M to about 1×10⁻¹² M, about 1×10⁻¹⁰ M to about 1×10⁻¹¹ M, about 1×10⁻¹¹ M to about 1×10⁻¹³ M, about 1×10⁻¹¹ M to about 1×10⁻¹² M, or about 1×10⁻¹² M to about 1×10⁻¹³ M to CD16 (FcγRIII). In embodiments, the Fc region of the therapeutic IgG antibody has a dissociation constant of about 1×10⁻⁵ M, about 1×10⁻⁶ M, about 1×10⁻⁷ M, about 1×10⁻⁸ M, about 1×10⁻⁹ M, about 1×10⁻¹⁰ M, about 1×10⁻¹¹ M, about 1×10⁻¹² M, or about 1×10⁻¹³ M to CD16 (FcγRIII). In embodiments, the Fc region of the therapeutic IgG antibody has a dissociation constant of about 1×10⁻⁵ M to CD16 (FcγRIII). In embodiments, the Fc region of the therapeutic IgG antibody has a dissociation constant of about 1×10⁻⁶ M to CD16 (FcγRIII). In embodiments, the Fc region of the therapeutic IgG antibody has a dissociation constant of about 1×10⁻⁷ M to CD16 (FcγRIII). In embodiments, the Fc region of the therapeutic IgG antibody has a dissociation constant of about 1×10⁻⁸ M to CD16 (FcγRIII). In embodiments, the Fc region of the therapeutic IgG antibody has a dissociation constant of about 1×10⁻⁹ M to CD16 (FcγRIII). In embodiments, the Fc region of the therapeutic IgG antibody has a dissociation constant of about 1×10⁻¹⁰ M to CD16 (FcγRIII). In embodiments, the Fc region of the therapeutic IgG antibody has a dissociation constant of about 1×10⁻¹¹ M to CD16 (FcγRIII). In embodiments, the Fc region of the therapeutic IgG antibody has a dissociation constant of about 1×10⁻¹² M to CD16 (FcγRIII). In embodiments, the Fc region of the therapeutic IgG antibody has a dissociation constant of about 1×10⁻¹³ M to CD16 (FcγRIII).

[0240] Embodiments of the methods of treating cancer include a therapeutic IgG antibody, where the Fc region of the therapeutic IgG antibody has a dissociation constant of about 1×10⁻⁵ M to about 1×10⁻¹³ M to CD64 (FcγRI). In embodiments, the Fc region of the therapeutic IgG antibody has a dissociation constant of about 1×10⁻⁵ M to about 1×10⁻¹³ M to CD64 (FcγRI). In embodiments, the Fc region of the therapeutic IgG antibody has a dissociation constant of about 1×10⁻⁵ M to about 1×10⁻¹² M, about 1×10⁻⁵ M to about 1×10⁻¹¹ M, about 1×10⁻⁵ M to about 1×10⁻¹⁰ M, about 1×10⁻⁵ M to about 1×10⁻⁹ M, about 1×10⁻⁵ M to about 1×10⁻⁸ M, about 1×10⁻⁵ M to about 1×10⁻⁷ M, about 1×10⁻⁵ M to about 1×10⁻⁶ M, about 1×10⁻⁶ M to about 1×10⁻¹³ M, about 1×10⁻⁶ M to about 1×10⁻¹² M, about 1×10⁻⁶ M to about 1×10⁻¹¹ M, about 1×10⁻⁶ M to about 1×10⁻¹⁰ M, about 1×10⁻⁶ M to about 1×10⁻⁹ M, about 1×10⁻⁶ M to about 1×10⁻⁸ M, about 1×10⁻⁶ M to about 1×10⁻⁷ M, about 1×10⁻⁷ M to about 1×10⁻¹³ M, about 1×10⁻⁷ M to about 1×10⁻¹² M, about 1×10⁻⁷ M to about 1×10⁻¹¹ M, about 1×10⁻⁷ M to about 1×10⁻¹⁰ M, about 1×10⁻⁷ M to about 1×10⁻⁹ M, about 1×10⁻⁷ M to about 1×10⁻⁸ M, about 1×10⁻⁸ M to about 1×10⁻¹³ M, about 1×10⁻⁸ M to about 1×10⁻¹² M, about 1×10⁻⁸ M to about 1×10⁻¹¹ M, about 1×10⁻⁸ M to about 1×10⁻¹⁰ M, about 1×10⁻⁸ M to about 1×10⁻⁹ M, about 1×10⁻⁹ M to about 1×10⁻¹³ M, about 1×10⁻⁹ M to about 1×10⁻¹² M, about 1×10⁻⁹ M to about 1×10⁻¹¹ M, about 1×10⁻⁹ M to about 1×10⁻¹⁰ M, about 1×10⁻¹⁰ M to about 1×10⁻¹³ M, about 1×10⁻¹⁰ M to about 1×10⁻¹² M, about 1×10⁻¹⁰ M to about 1×10⁻¹¹ M, about 1×10⁻¹¹ M to about 1×10⁻¹³ M, about 1×10⁻¹¹ M to about 1×10⁻¹² M, or about 1×10⁻¹² M to about 1×10⁻¹³ M to CD64 (FcγRI). In embodiments, the Fc region of the therapeutic IgG antibody has a dissociation constant of about 1×10⁻⁵ M, about 1×10⁻⁶ M, about 1×10⁻⁷ M, about 1×10⁻⁸ M, about 1×10⁻⁹ M, about 1×10⁻¹⁰ M, about 1×10⁻¹¹ M, about 1×10⁻¹² M, or about 1×10⁻¹³ M to CD64 (FcγRI). In embodiments, the Fc region of the therapeutic IgG antibody has a dissociation constant of about 1×10⁻⁵ M to CD64 (FcγRI). In embodiments, t the Fc region of the therapeutic IgG antibody has a dissociation constant of about 1×10⁻⁶ M to CD64 (FcγRI). In embodiments, the Fc region of the therapeutic IgG antibody has a dissociation constant of about 1×10⁻⁷ M to CD64 (FcγRI). In embodiments, the Fc region of the therapeutic IgG antibody has a dissociation constant of about 1×10⁻⁸ M to CD64 (FcγRI). In embodiments, the Fc region of the therapeutic IgG antibody has a dissociation constant of about 1×10⁻⁹ M to CD64 (FcγRI). In embodiments, the Fc region of the therapeutic IgG antibody has a dissociation constant of about 1×10⁻¹⁰ M to CD64 (FcγRI). In embodiments, the Fc region of the therapeutic IgG antibody has a dissociation constant of about 1×10⁻¹¹ M to CD64 (FcγRI). In embodiments, the Fc region of the therapeutic IgG antibody has a dissociation constant of about 1×10⁻¹² M to CD64 (FcγRI).

[0241] In embodiments, the Fc region of the therapeutic IgG antibody has a dissociation constant of about 1×10⁻¹³ M to CD64 (FcγRI).

[0242] In an aspect, provided herein are methods of enhancing efficacy of therapeutic IgG antibody in a subject including mutating the hinge region of a therapeutic IgG antibody to produce a variant of the therapeutic IgG antibody that is resistant to a protease according to any of the various embodiments described herein.

[0243] In embodiments of a method of enhancing efficacy of therapeutic IgG antibody in a subject, the therapeutic IgG antibody is resistant to a protease, where the protease is an IgG specific protease. In embodiments, the IgG specific protease is selected from IdeS and IdeZ. In embodiments, the IgG specific protease is IdeS protease. In embodiments, the IgG specific protease is IdeZ protease. In embodiments, the protease is specific for an ELLGGPS amino acid sequence (SEQ ID NO: 544). In embodiments, the ELLGGPS amino acid sequence specific protease is selected from pepsin, matrix metalloproteinase 7 (MMP7), matrix metalloproteinase 3 (MMP3), matrix metalloproteinase (MMP12), cathepsin G, and glutamyl endopeptidase V8 (GluV8). In embodiments, the ELLGGPS amino acid sequence specific protease is pepsin. In embodiments, the ELLGGPS amino acid sequence specific protease is matrix metalloproteinase 7 (MMP7). In embodiments, the ELLGGPS amino acid sequence specific protease is matrix metalloproteinase 3 (MMP3). In embodiments, the ELLGGPS amino acid sequence specific protease is matrix metalloproteinase (MMP12). In embodiments, the ELLGGPS amino acid sequence specific protease is cathepsin G. In embodiments, the ELLGGPS amino acid sequence specific protease is glutamyl endopeptidase V8 (GluV8).

[0244] In embodiments of a method of enhancing efficacy of therapeutic IgG antibody in a subject, the therapeutic IgG antibody is any antibody as described above and herein. Further, the therapeutic IgG antibody is an antibody selected from Herceptin and any other IgG therapeutic mAb that relies on the Fc region of the IgG antibody binding to FcγR of any innate immune cell (e.g., NK cells, monocytes, macrophages, dendritic cells, and granulocytes) for its efficacy.

[0245] Further disclosed herein are methods of using proteins, antibodies, fusion proteins, antibody fragments, antigens and Chinese Hamster Ovary (CHO) cells as described herein. In some embodiments, the methods relate to using proteins, antibodies, fusion proteins, antibody fragments, antigens and CHO cells for rapid optimization of an antibody-antigen interactions via affinity selection. In some embodiments, the methods relate to using proteins, antibodies, fusion proteins, antibody fragments, antigens and CHO cells as described herein to improve efficacy of a therapeutic antibody where a portion or full therapeutic effect is mediated via ADCC or ADCP.

[0246] In an aspect, provided herein are methods of generating an IgG antibody with a hinge region resistant to an IgG specific protease.

[0247] In an aspect, provided herein are methods of generating an IgG antibody with a hinge region able to bind CD32 (FcγRII), CD16 (FcγRIII), and CD64 (FcγRI) with higher affinity.

[0248] In an aspect, provided herein are methods of generating an IgG antibody with a hinge region able to bind CD32 (FcγRII), CD16 (FcγRIII), and CD64 (FcγRI) with lower affinity.

[0249] In an aspect, provided herein are methods of generating an IgG antibody with hinge regions that are resistant to the IgG specific protease and are able to bind CD32 (FcγRII), CD16 (FcγRIII), and CD64 (FcγRI) with higher affinity

[0250] In an aspect, provided herein are methods of generating an IgG antibody with hinge regions that are resistant to the IgG specific protease and are able to bind CD32 (FcγRII), CD16 (FcγRIII), and CD64 (FcγRI) with lower affinity.

[0251] In an aspect, provided herein are methods of generating an IgG antibody with varied affinity to its specific antigen.

[0252] It is understood that the examples and embodiments described herein are for illustrative purposes only and that various modifications or changes in light thereof will be suggested to persons skilled in the art and are to be included within the spirit and purview of this application and scope of the appended claims. All publications, patents, and patent applications cited herein are hereby incorporated by reference in their entirety for all purposes.

### P-Embodiments

[0253] Embodiment P-1. An immunoglobulin G (IgG) antibody comprising a Fab region and an Fc region connected through a hinge region, wherein the hinge region is resistant to cleavage by a protease.

[0254] Embodiment P-2. The IgG antibody of Embodiment 1, wherein the IgG antibody is an IgG1 antibody, an IgG2 antibody, an IgG3 antibody, or an IgG4 antibody.

[0255] Embodiment P-3. The IgG antibody of any one of Embodiments 1-2, wherein the IgG antibody is an IgG1 antibody.

[0256] Embodiment P-4. The IgG antibody of any one of Embodiments 1-2, wherein the IgG antibody is an IgG2 antibody.

[0257] Embodiment P-5. The IgG antibody of any one of Embodiments 1-2, wherein the IgG antibody is an IgG3 antibody.

[0258] Embodiment P-6. The IgG antibody of any one of Embodiments 1-2, wherein the IgG antibody is an IgG4 antibody.

[0259] Embodiment P-7. The IgG antibody of Embodiment 6, wherein the hinge region comprises a protease resistant sequence between amino acid positions 246-252 according to the EU numbering of Kabat.

[0260] Embodiment P-8. The IgG antibody of Embodiment 7, wherein the protease resistant sequence is 2 or more amino acids in length.

[0261] Embodiment P-9. The IgG antibody of Embodiment 7, wherein the protease resistant sequence is 3 amino acids in length.

[0262] Embodiment P-10. The IgG antibody of Embodiment 7, wherein the protease resistant sequence is 4 amino acids in length.

[0263] Embodiment P-11. The IgG antibody of Embodiment 7, wherein the protease resistant sequence is 5 amino acids in length.

[0264] Embodiment P-12. The IgG antibody of Embodiment 7, wherein the protease resistant sequence is 6 amino acids in length.

[0265] Embodiment P-13. The IgG antibody of Embodiment 7, wherein the protease resistant sequence is 7 amino acids in length.

[0266] Embodiment P-14. The IgG antibody of Embodiment 7, wherein the protease resistant sequence comprises the amino acids of SEQ ID NO: 545.

[0267] Embodiment P-15. The IgG antibody of any one of Embodiments 1-14, wherein the Fc region has a dissociation constant of about 1×10⁻⁵ M to about 1×10⁻¹³ M to one or more of CD32 (FcγRII), CD16 (FcγRIII), and CD64 (FcγRI).

[0268] Embodiment P-16. The IgG antibody of any one of Embodiments 1-15, wherein the Fc region has a dissociation constant of about 1×10⁻⁵ M to about 1×10⁻¹³ M to CD32.

[0269] Embodiment P-17. The IgG antibody of any one of Embodiments 1-16, wherein the Fc region has a dissociation constant of about 1×10⁻⁵ M to about 1×10⁻¹³ M to CD16.

[0270] Embodiment P-18. The IgG antibody of any one of Embodiments 1-17, wherein the Fc region has a dissociation constant of about 1×10⁻⁵ M to about 1×10⁻¹³ M to CD64.

[0271] Embodiment P-19. The IgG antibody of any one of Embodiments 1-18, wherein the protease is an IgG specific protease.

[0272] Embodiment P-20. The IgG antibody of Embodiment 19, wherein the IgG specific protease is selected from IdeS and IdeZ

[0273] Embodiment P-21. The IgG antibody of Embodiment 20, wherein the protease is IdeS.

[0274] Embodiment P-22. The IgG antibody of Embodiment 20, wherein the protease is IdeZ.

[0275] Embodiment P-23. The IgG antibody of any one of Embodiments 1-18, wherein the protease is selected from pepsin, matrix metalloproteinase 7 (MMP7), matrix metalloproteinase 3 (MMP3), matrix metalloproteinase (MMP12), cathepsin G, and glutamyl endopeptidase V8 (GluV8).

[0276] Embodiment P-24. An immunoglobulin G (IgG) antibody, wherein the antibody comprises a Fab region and an Fc region connected through a hinge region, wherein the Fc region has a dissociation constant of about 1×10⁻⁵ M to about 1×10⁻¹³ M to one or more of CD32 (FcγRII), CD16 (FcγRIII), and CD64 (FcγRI).

[0277] Embodiment P-25. The IgG antibody of Embodiment 24, wherein the Fc region comprises one or more amino acid substitutions conferring higher binding affinity for one or more of CD32 (FcγRII), CD16 (FcγRIII), and CD64 (FcγRI) compared to a wild type Fc.

[0278] Embodiment P-26. The IgG antibody of Embodiment 25, wherein the Fc region comprises an amino acid substitution selected from S252D, I351E, and A349L according to the EU numbering of Kabat and wherein the substitution confers higher binding affinity for CD16 (FcγRIII) compared to wild type.

[0279] Embodiment P-27. The IgG antibody of Embodiment 26, wherein the Fc region comprises amino acid substitution S252D.

[0280] Embodiment P-28. The IgG antibody of Embodiment 26, wherein the Fc region comprises amino acid substitution I351E.

[0281] Embodiment P-29. The IgG antibody of Embodiment 26, wherein the Fc region comprises amino acid substitutions S252D and I351E.

[0282] Embodiment P-30. The IgG antibody of Embodiment 26, wherein the Fc region comprises amino acid substitutions S252D, I351E, and A349.

[0283] Embodiment P-31. The IgG antibody of any one of Embodiments 24 or 25, wherein the Fc region has a dissociation constant of about 1×10⁻⁵ M to about 1×10⁻¹³ M to CD32.

[0284] Embodiment P-32. The IgG antibody of any one of Embodiments 24-30, wherein the Fc region has a dissociation constant of about 1×10⁻⁵ M to about 1×10⁻¹³ M to CD16.

[0285] Embodiment P-33. The IgG antibody of any one of Embodiments 24 or 25, wherein the Fc region has a dissociation constant of about 1×10⁻⁵ M to about 1×10⁻¹³ M to CD64.

[0286] Embodiment P-34. The IgG antibody of any one of Embodiments 24-33, wherein the antibody is resistant to protease cleavage.

[0287] Embodiment P-35. The IgG antibody of Embodiment 34, wherein the protease is an IgG specific protease.

[0288] Embodiment P-36. The IgG antibody of Embodiment 35, wherein the IgG specific protease is IdeS.

[0289] Embodiment P-37. The IgG antibody of Embodiment 35, wherein the IgG specific protease is IdeZ.

[0290] Embodiment P-38. The IgG antibody of Embodiment 34, wherein the protease is selected from pepsin, matrix metalloproteinase 7 (MMPI), matrix metalloproteinase 3 (MMP3), matrix metalloproteinase (MMP12), cathepsin G, and glutamyl endopeptidase V8 (GluV8).

[0291] Embodiment P-39. The IgG antibody of any one of Embodiments 34-38, wherein the hinge region comprises a protease resistant sequence at amino acid positions 246-252 according to the EU numbering of Kabat and that is 2 or more amino acids in length.

[0292] Embodiment P-40. The IgG antibody of Embodiment 39, wherein the protease resistant sequence is 3 amino acids in length.

[0293] Embodiment P-41. The IgG antibody of Embodiment 39, wherein the protease resistant sequence is 4 amino acids in length.

[0294] Embodiment P-42. The IgG antibody of Embodiment 39, wherein the protease resistant sequence is 5 amino acids in length.

[0295] Embodiment P-43. The IgG antibody of Embodiment 39, wherein the protease resistant sequence is 6 amino acids in length.

[0296] Embodiment P-44. The IgG antibody of Embodiment 39, wherein the protease resistant sequence is 7 amino acids in length.

[0297] Embodiment P-45. The IgG antibody of Embodiment 39, wherein the hinge region comprises the amino acids of SEQ ID NO: 545.

[0298] Embodiment P-46. A recombinant protein comprising:

[0299] a Type I transmembrane domain; and

[0300] b. an immunoglobulin G (IgG) antibody;

[0301] wherein the transmembrane domain is fused to the C-terminus of the IgG antibody; and

[0302] wherein the recombinant protein is resistant to cleavage by a protease.

[0303] Embodiment P-47. The recombinant protein of Embodiment 46, wherein the Type I transmembrane domain is capable of dimerization.

[0304] Embodiment P-48. The recombinant protein of any one of claim 46 or 47, wherein the Type I transmembrane domain is selected from an EGFR, PDGFR-alpha, PDGFR-beta, HER2, HER3, HER4, FGFR1, FGFR2, FGFR3, FGFR4, VEGFR1, VEGFR2, VEGFR3, Trk-A, Trk-B, Trk-C, and insulin receptor transmembrane domain.

[0305] Embodiment P-49. The recombinant protein of any one of Embodiments 46-48, wherein the Type I transmembrane domain is an EGFR transmembrane domain.

[0306] Embodiment P-50. The recombinant protein of any one of Embodiments 46-49, wherein the IgG antibody is an IgG1 antibody, an IgG2 antibody, an IgG3 antibody, or an IgG4 antibody.

[0307] Embodiment P-51. The recombinant protein of any one of Embodiments 46-49, wherein the IgG domain is an IgG1 antibody.

[0308] Embodiment P-52. The recombinant protein of any one of Embodiments 46-49, wherein the IgG domain is an IgG2 antibody.

[0309] Embodiment P-53. The recombinant protein of any one of Embodiments 46-49, wherein the IgG domain is an IgG3 antibody.

[0310] Embodiment P-54. The recombinant protein of any one of Embodiments 46-49, wherein the IgG domain is an IgG4 antibody.

[0311] Embodiment P-55. The recombinant protein of any one of Embodiments 46-54, wherein the IgG antibody comprises an Fc (fragment crystallizable) region, a Fab (antigen-binding fragment) region, and a hinge region.

[0312] Embodiment P-56. The recombinant protein of Embodiment 55, wherein the IgG antibody comprises an Fc region.

[0313] Embodiment P-57. The recombinant protein of Embodiment 55, wherein the IgG antibody comprises a hinge region.

[0314] Embodiment P-58. The recombinant protein of any one of Embodiments 55-57, wherein the hinge region comprises a protease resistant sequence between amino acid positions 246-252 according to the EU numbering of Kabat and that is 2 or more amino acids in length.

[0315] Embodiment P-59. The recombinant protein of Embodiment 58, wherein the protease resistant sequence is 3 amino acids in length.

[0316] Embodiment P-60. The recombinant protein of Embodiment 58, wherein the protease resistant sequence is 4 amino acids in length.

[0317] Embodiment P-61. The recombinant protein of Embodiment 58, wherein the protease resistant sequence is 5 amino acids in length.

[0318] Embodiment P-62. The recombinant protein of Embodiment 58, wherein the protease resistant sequence is 6 amino acids in length.

[0319] Embodiment P-63. The recombinant protein of Embodiment 58, wherein the protease resistant sequence is 7 amino acids in length.

[0320] Embodiment P-64. The recombinant protein of Embodiment 58, wherein the hinge region comprises the amino acids of SEQ ID NO: 545.

[0321] Embodiment P-65. The recombinant protein of any one of Embodiments 46-64, wherein the recombinant protein comprises an Fc region with a dissociation constant of about 1×10⁻⁵ M to about 1×10⁻¹³ M to one or more of CD32 (FcγRII), CD16 (FcγRIII), and CD64 (FcγRI).

[0322] Embodiment P-66. The recombinant protein of any one of Embodiments 46-65, wherein the recombinant protein comprises an Fc region with a dissociation constant of about 1×10⁻⁵ M to about 1×10⁻¹³ M to CD32.

[0323] Embodiment P-67. The recombinant protein of any one of Embodiments 46-66, wherein the recombinant protein comprises an Fc region with a dissociation constant of about 1×10⁻⁵ M to about 1×10⁻¹³ M to CD16.

[0324] Embodiment P-68. The recombinant protein of any one of Embodiments 46-67, wherein the recombinant protein comprises an Fc region with a dissociation constant of about 1×10⁻⁵ M to about 1×10⁻¹³ M to CD64.

[0325] Embodiment P-69. The recombinant protein of any one of Embodiments 46-68, wherein the protease is an IgG specific protease.

[0326] Embodiment P-70. The recombinant protein of Embodiment 69, wherein the IgG specific protease is selected from IdeS and IdeZ.

[0327] Embodiment P-71. The recombinant protein of Embodiment 70, wherein the IgG specific protease is IdeS.

[0328] Embodiment P-72. The recombinant protein of Embodiment 70, wherein the IgG specific protease is IdeZ.

[0329] Embodiment P-73. The recombinant protein of Embodiment 69, wherein the protease is selected from pepsin, matrix metalloproteinase 7 (MMPI), matrix metalloproteinase 3 (MMP3), matrix metalloproteinase (MMP12), cathepsin G, and glutamyl endopeptidase V8 (GluV8).

[0330] Embodiment P-74. A recombinant protein comprising:

[0331] a. a Type I-transmembrane domain; and

[0332] b. an immunoglobulin G (IgG) antibody;
[0333] wherein the transmembrane domain is fused to the C-terminus of the IgG antibody; and wherein the recombinant protein comprises an Fc region with a dissociation constant of about 1×10⁻⁵ M to about 1×10⁻¹³ M to one or more of CD32 (FcγRII), CD16 (FcγRIII), and CD64 (FcγRI).

[0334] Embodiment P-75. The recombinant protein of Embodiment 74, wherein the Type I transmembrane domain is capable of dimerization.

[0335] Embodiment P-76. The recombinant protein of any one of Embodiments 74 or 75, wherein the Type I transmembrane domain is selected from an EGFR, PDGFR-alpha, PDGFR-beta, HER2, HER3, HER4, FGFR1, FGFR2, FGFR3, FGFR4, VEGFR1, VEGFR2, VEGFR3, Trk-A, Trk-B, Trk-C, and insulin receptor transmembrane domain.

[0336] Embodiment P-77. The recombinant protein of any one of Embodiments 74-76, wherein the Type I transmembrane domain is an EGFR transmembrane domain.

[0337] Embodiment P-78. The recombinant protein of any one of Embodiments 74-77, wherein the IgG antibody is an IgG1 antibody, an IgG2 antibody, an IgG3 antibody, or an IgG4 antibody.

[0338] Embodiment P-79. The recombinant protein of any one of Embodiments 74-78, wherein the IgG domain is an IgG1 antibody.

[0339] Embodiment P-80. The recombinant protein of any one of Embodiments 74-78, wherein the IgG domain is an IgG2 antibody.

[0340] Embodiment P-81. The recombinant protein of any one of Embodiments 74-78, wherein the IgG domain is an IgG3 antibody.

[0341] Embodiment P-82. The recombinant protein of any one of Embodiments 74-78, wherein the IgG domain is an IgG4 antibody.

[0342] Embodiment P-83. The recombinant protein of any one of Embodiments 74-82, wherein the Fc region comprises one or more amino acids conferring high binding affinity for one or more of CD32 (FcγRII), CD16 (FcγRIII), and CD64 (FcγRI) compared to wild type Fc.

[0343] Embodiment P-84. The recombinant protein of any one of Embodiments 74-83, wherein the Fc region has a dissociation constant of about 1×10⁻⁵ M to about 1×10⁻¹³ M to CD32.

[0344] Embodiment P-85. The recombinant protein of any one of Embodiments 74-83, wherein the Fc region has a dissociation constant of about 1×10⁻⁵ M to about 1×10⁻¹³ M to CD16.

[0345] Embodiment P-86. The recombinant protein of any one of Embodiments 74-83, wherein the Fc region has a dissociation constant of about 1×10⁻⁵ M to about 1×10⁻¹³ M to CD64.

[0346] Embodiment P-87. The recombinant protein of any one of Embodiments 74-85, wherein the recombinant protein is resistant to protease cleavage.

[0347] Embodiment P-88. The recombinant protein of Embodiment 87, wherein the protease is an IgG specific protease.

[0348] Embodiment P-89. The recombinant protein of Embodiment 88, wherein the IgG protease is IdeS.

[0349] Embodiment P-90. The recombinant protein of Embodiment 88, wherein the IgG protease is IdeZ.

[0350] Embodiment P-91. The recombinant protein of Embodiment 87, wherein the protease is selected from pepsin, matrix metalloproteinase 7 (MMPI), matrix metalloproteinase 3 (MMP3), matrix metalloproteinase (MMP12), cathepsin G, and glutamyl endopeptidase V8 (GluV8).

[0351] Embodiment P-92. The recombinant protein of any one of Embodiments 74-91, wherein the recombinant protein comprises a hinge region and wherein the hinge region comprises a protease resistant sequence at amino acid positions 246-252 according to the EU numbering of Kabat and that is 2 or more amino acids in length.

[0352] Embodiment P-93. The recombinant protein of Embodiment 92, wherein the protease resistant sequence is 3 amino acids in length.

[0353] Embodiment P-94. The recombinant protein of Embodiment 92, wherein the protease resistant sequence is 4 amino acids in length.

[0354] Embodiment P-95. The recombinant protein of Embodiment 92, wherein the protease resistant sequence is 5 amino acids in length.

[0355] Embodiment P-96. The recombinant protein of Embodiment 92, wherein the protease resistant sequence is 6 amino acids in length.

[0356] Embodiment P-97. The recombinant protein of Embodiment 92, wherein the protease resistant sequence is 7 amino acids in length.

[0357] Embodiment P-98. The recombinant protein of Embodiment 92, wherein the hinge region comprises the amino acids of SEQ ID NO: 545.

[0358] Embodiment P-99. An isolated nucleic acid encoding the recombinant protein of any one of Embodiments 46-98.

[0359] Embodiment P-100. An expression vector comprising the nucleic acid of Embodiment 99.

[0360] Embodiment P-101. A cell comprising the expression vector of Embodiment 100.

[0361] Embodiment P-102. The cell of Embodiment 101, wherein the cell is a eukaryotic cell.

[0362] Embodiment P-103. The cell of Embodiment 101 or 102, wherein the cell is a Chinese hamster ovary cell.

[0363] Embodiment P-104. The cell of any one of Embodiments 101-103, wherein an IgG antibody is expressed at the surface of the cell.

[0364] Embodiment P-105. An anti-CD20 antibody comprising the CDRs as set forth in FIG. 3.

[0365] Embodiment P-106. A method of binding a ligand to a CHO cell surface recombinant protein, the method comprising contacting a ligand with a CHO cell surface recombinant protein, wherein said CHO cell surface recombinant protein comprises:

[0366] i. an EGFR-transmembrane domain; and

[0367] ii. an immunoglobulin G (IgG) antibody;
[0368] wherein the EGFR-transmembrane domain is fused to the C-terminus of the IgG domain; and
[0369] wherein the IgG antibody is capable of binding a ligand; and
   [0370] wherein the CHO cell surface protein is resistant to cleavage by an IgG-specific protease or has higher binding affinity for one or more of CD32 (FcγRII), CD16 (FcγRIII), and CD64 (FcγRI).

[0371] Embodiment P-107. A method of treating cancer in a patient comprising administering a therapeutic IgG antibody and an IgG specific protease, wherein the therapeutic IgG antibody is resistant to an IgG specific protease.

[0372] Embodiment P-108. The method of Embodiment 107, wherein the therapeutic IgG antibody has a dissociation constant of about 1×10⁻⁵ M to about 1×10⁻¹³ M to one or more of CD20, CD32 (FcγRII), CD16 (FcγRIII), and CD64 (FcγRI).

[0373] Embodiment P-109. A method of enhancing efficacy of therapeutic IgG antibody in a subject comprising administering to the subject an IgG specific protease and a therapeutic IgG that is resistant to the IgG specific protease.

[0374] Embodiment P-110. The method of Embodiment 109, wherein the IgG specific protease is selected from IdeS and IdeZ

### EXAMPLES

### Example 1

### IgG Antibodies and Endopeptidase

[0375] FIG. 1 schematically illustrates that human immune cells are naturally coated with endogenous IgG, which prevents interactions between a therapeutic mAb and FcγRs expressed on the surface of the human immune cells. This thereby limits the binding of therapeutic mAb to FcγRs thus limits the efficacy of the therapeutic mAb.

[0376] The flow cytometric data in FIG. 2 demonstrates that human NK cells are naturally coated with IgG molecules, which can be removed by incubation with the IdeS enzyme. Human PBMCs were digested with IdeS for 30 minutes at 37° C. and stained with antibodies against linage markers or against human IgG Fc. Note CD3+ T cells do not express FcγRs and therefore do not bind human IgG under any condition.

[0377] FIG. 3 schematically illustrates a strategy for enhancing therapeutic efficiency of mAbs. Panel (a) depicts FcγRs on immune cells are normally occupied by endogenous IgG; panel (b) shows IdeS digestion can remove endogenous IgG and free-up FcγR binding sites for infused therapeutic mAbs, which are engineered to be resistant to IdeS and retain FcγR binding function; (c) shows infused therapeutic mAb may first bind onto unoccupied FcγR or as depicted in (d) may first bind tumor-associated antigen expressed on the cancer cell. Regardless, once the antigen-mAb-FcγR crosslink, the FcγR+ cell undergoes immune activation (f). The flow chart illustrates that the more FcγRs that are unoccupied and therefore available for binding the therapeutic mAb, the more tumor cells are eliminated.

### Example 2

### Novel Therapeutic Antibody Screening and Engineering Platform

[0378] A number of FDA approved antibody therapeutics developed thus far are produced in Chinese hamster ovarian (CHO) cells, because recombinant proteins produced by CHO cells possess post translational modifications that are compatible and bioactive in humans. Therefore, CHO cells represent an ideal system for therapeutic antibody screening and engineering.

[0379] The experiments conducted herein aimed to develop a method to display full length, fragments, or combinations of Ig- and/or Fc-containing fusion proteins on the surface of CHO cells.

[0380] A method of selecting one subset of CHO cell surface expressed EGFR-TMH/mAb and EGFR-TMF/FcγR fusion proteins via flow cytometry was developed. Each IgG or Fc-containing molecule expressed on the surface of the CHO cells is fully functional, including individual IgG domains, Fc domains, partial antibodies, partial receptors, full length antibody, full length antibody, or a combination of individual IgG/Fc domains behaves similarly to the analogous soluble construct (removing the EGFR-TMH portion). Flow cytometry was employed as the method to study different portions of these molecules, identifying their physical and chemical characteristics for an application of interest.

[0381] EGFR-TMH (SEQ ID NO: 6) was tested to optimize surface expression of IgG in CHO cells. As shown in the top row of FIG. 4, results for surface expression of IgG-Fc with a GFP reporter are presented. In the bottom row of FIG. 4, results for surface expression of full length rituximab with a GFP marker are presented. The fluorescence of GFP on the X axis is proportional to the surface density expression of Fc and of rituximab on the surface of the CHO cells. Each of these two IgG molecules expressed on the surface of the CHO cells was as functional as soluble IgG, allowing use of flow cytometry to study different portions of the IgG. This eliminates the need for protein purification to optimize mAb binding properties to their cognate antigen and to the three classes of Fc-gamma receptors (FcγR) expressed on the surface of innate immune effector cells.

[0382] The hinge region of IgG is almost untouched by previous studies because it is highly flexible and the two hinges bind FcγR tightly and asymmetrically. IgG1 FcΔ16 was made by deleting the WT hinge region sequence ELLGGPS. Amino acids were added to the N-terminus of IgG1 FcΔ16 and variants that gained CD16α binding were selected for next round modification. Several de novo hinge regions were generated using the CHO cell display platform which shows higher affinity to FcγRs than the original (or wild type) hinge region. It is important to note that this technology is also a platform technology in that it can be used to modify any antibody for which the sequence is known in order to obtain variants with increased or decreased binding affinity for FcγRs.

[0383] FIG. 5 illustrates the generation of new lower hinge for IgG1Fc with enhanced binding affinity to CD16α and resistance to cleavage by IdeS and IdeZ. Amino acids were added in a stepwise fashion to the N-terminus of IgG1 Δ16 (SEQ ID NO: 16), which does not bind CD16α. Clones acquiring CD16α binding were selected for by sequentially attaching more amino acids step by step to increase binding affinity. The 7AA de novo hinge regions that were tested, found to be resistant to IdeS/Z and showed similar or higher binding affinity to CD16α than the wild type sequence were engrafted to the mAb.

[0384] The wild type lower hinge region of human IgG1 binds to FcγRIII CD16α with relatively low affinity (FIG. 6). Panel (A) shows human IgG1 Fc Δ16 (SEQ ID NO: 16), which lacks of the wild type hinge (ELLGGPS; SEQ ID NO: 544), lost binding to FcγRIII CD16. Four-hundred (400) combinations of 2 amino acids were added to the N-terminus of human IgG1 Fc Δ16, and individually measured for their binding to CD16α and other FcγRs. Among all the sequences that acquired CD16a binding, DW was selected for next round optimizations which lead to the identification of CWDW, and subsequently other 6 and 7 AA sequences.

[0385] FIG. 6 illustrates the stepwise acquisition of CD16α binding by sequentially adding AAs to IgG1FcΔ16 at its N-terminus. FIG. 6A show binding affinity of various constructs of human IgG1FcΔ16 fused with EGFR transmembrane helix domain and displayed as a type 1 membrane protein on the CHO cell surface. Due to the lack of a hinge region, IgG1FcΔ16 does not bind human CD16α. Four hundred 2AA combinations were added at the N-terminus of IgG1FcΔ16 and individually assayed for their binding to CD16a by rapid flow cytometric analysis. The first two AA, DW, were selected for further optimization and led to the identification of 4AA, 6AA and 7AA de novo hinges with increasing CD16a binding as shown. These experiments were performed in the presence of IdeS, demonstrating resistance of the novel IgG1 hinge regions to cleavage. FIG. 6B shows individual panels of all the positive clones as more AAs were added.

[0386] FIG. 7 shows data collected from CHO cells transfected with rituximab-EGFR. The hinge region of the rituximab is composed of either the wild type (WT) hinge (ELLGGPS; SEQ ID NO: 544), or one of two de novo IdeS/IdeZ-resistant hinges: EETCWDW, which has higher affinity for FcγR CD16α than the WT or EDSCWDW, which has lower affinity for FcγR CD16α than the WT. The assessment of surface IgG1 expression on the CHO cells was accomplished using soluble fluorescent labeled CD16α Val176 binding and fluorescent labeled anti-human Fc antibody (that binds a region of the Fc not affected by the cleavage). CD16α Val176 and Phe176 are polymorphisms with different affinity for IgG1. Transfected CHO cells were either incubated with media alone (control, upper row) or digested with IdeZ at 37° C. for 30 minutes before staining (lower row). The binding affinities of IgG1 for CD16α are indicated in the upper left-hand quadrant of each histogram. As noted in the lower row, incubation with IdeZ resulted in cleavage of the WT hinge with loss of CD16α binding and affinity), while the de novo hinges were resistant to cleavage by IdeZ and therefore retained both binding and nearly identical affinity when compared to the upper row.

[0387] De novo hinges can be engrafted into different antibodies and still retain the same IdeS/IdeZ resistance and improved FcγRs binding (FIG. 8, FIG. 10). Similar constructs can be generated to modify mAb binding to the three classes of IgG FcγRs. It is well established that there are three classes of FcγR: FcγRI (CD64) has the highest affinity and is found on granulocytes; FcγRII (CD32) has intermediate affinity and is found on monocytes and dendritic cells; FcγRIII (CD16) has lower affinity and is found on monocytes, macrophages and on natural killer cells. IgG contains two Fab arms, an Fc domain and a flexible hinge region linked between the Fab arms and the Fc domain. Both the Fc domain and the hinge region of IgG contribute to binding FcγRs (including CD64, CD32, CD16) expressed on innate immune effector cells and mediate target cell destruction by cellular means including antibody-dependent cellular cytotoxicity (ADCC) and/or antibody-dependent cellular phagocytosis (ADCP). Significant efforts have been made toward improving IgG-FcγR binding.

[0388] FIG. 8 shows binding affinity of various FcγRs to CHO cells expressing rituximab whose hinge moiety is either WT (ELLGGPS; SEQ ID NO: 544) or has been engineered with novel de novo hinge regions variants (EETCWDW, SEQ ID NO: 545 or EDSCWDW, SEQ ID NO: 546) using the methodology described herein and shown in FIG. 7. The resulting surface IgG expression and binding affinities of various FcγRs were quantified using fluorescent labeled FcγRs ectodomain as indicated on the Y axis, and fluorescent labeled anti-human Fc antibody on the X axis. The FcγRs binding affinity to each hinge moiety is indicated in the upper left quadrant of each histogram. Note that the two novel AA hinge regions (EETCWDW, SEQ ID NO: 545 and EDSCWDW, SEQ ID NO: 546) show a dramatic decrease in affinity to CD16b and CD32a compared to WT (ELLGGPS, SEQ ID NO: 544), but show higher affinity to CD16α and CD64 compared to WT.

[0389] FIG. 9 provides a representative example illustrating the resistance of the novel hinge region (EETCWDW) to cleavage by IdeS/IdeZ. In this example the anti-CD20 mAb rituximab either contains its wild type (WT) hinge region or has been engineered to express the novel (EETCWDW) hinge region. WT rituximab or EETCWDW rituximab were first incubated at 37° C. for 30 minutes in the presence or absence of IdeZ protease. Next, the CD20(+) Daudi lymphoma cells were incubated with the processed WT or novel (EETCWDW) rituximab, washed and then stained with fluorescently-labelled anti human Fc antibody. The WT rituximab pre-incubated with IdeZ can no longer be detected on the surface of the CD20(+) Daudi lymphoma cells when stained with fluorescently-labelled anti human Fc antibody (left histogram, dashed line), while the EETCWDW rituximab can still be detected (right histogram, dashed line).

### Example 3

### Endopeptidase Resistant Hinge and FcγR Binding

[0390] The selection of the EETCWDW hinge region and its variants for FcγR binding properties and resistance to IdeS/IdeZ represents a platform technology, because the results seen with the anti-CD20 mAb rituximab are highly reproducible using a second unrelated therapeutic mAb, the anti-Her2/neu mAb called trastuzumab or Herceptin®. FIG. 10 shows CHO cells transfected with trastuzumab-EGFR. The trastuzumab contains either its wild type (WT) hinge moiety or one of two de novo novel hinge moieties EETCWDW (SEQ ID NO: 545) or EDSCWDW (SEQ ID NO: 546) that were engineered to replace of the WT hinge region of trastuzumab using the same methodology described herein for rituximab. EETCWDW and EDSCWDW trastuzumab demonstrate identical binding properties as was demonstrated with rituximab when engineered with the same two novel hinge regions as shown in FIG. 8. Specifically, the two novel trastuzumab mAbs with AA hinge regions (EETCWDW or EDSCWDW) show a dramatic decrease in affinity to CD16β and CD32α compared to WT (ELLGGPS) but show higher affinity to CD16α and CD64 than WT yet show no cleavage by either IdeZ or IdeS (not shown). The resulting surface IgG expression and binding affinities of various FcγRs were quantified using fluorescent labeled FcγRs ectodomain as indicated on the Y axis, and fluorescent labeled anti-human Fc antibody on the X axis. The FcγRs binding affinity to each hinge moiety is indicated in the upper left quadrant of each histogram.

[0391] FIG. 11 shows natural killer (NK) cell activation by staining for CD16/CD62L and CD107α/CD69, respectively. The higher affinity of EETCWDW rituximab for CD16α (compared to WT rituximab) leads to greater or stronger activation of the NK cell. When the NK cells' CD16 recognizes and binds EETCWDW rituximab that is bound to the B cell target, there is greater downregulation of CD16α, compared to the NK cells CD16 recognizing WT rituximab bound to the B cell target (compare FIG. 11A upper “control” row left lower quadrant “WT” (45.2) vs “EETCWDW” (80.5). The same is true for CD62L which downregulated following NK cell activation. When the NK cell recognizes EETCWDW rituximab binding to the B cell target, there is greater upregulation of CD107α, compared to the NK cell recognizing WT rituximab binding to the B cell target (compare FIG. 11B upper “control” row right upper quadrant “WT” (35.3) vs “EETCWDW” (62.8). The same is true for CD69. Further, treatment with IdeZ virtually eliminates activation of NK cells by WT rituximab (compare FIG. 11A “control” row, left lower quadrant “WT” (45.2) vs lower “IdeZ” row, left lower quadrant “WT” (8.8); and compare (FIG. 11B) upper “control” row right upper quadrant “WT” (35.8) vs lower “IdeZ” row, right upper quadrant “WT” (1.9). In contrast, treatment with IdeZ results in no or little decrease in NK cell activation by EETCWDW rituximab (compare FIG. 11A “control” row, left lower quadrant “EETCWDW” (80.5) vs lower “IdeZ” row, left lower quadrant “EETCWDW” (80.5); and compare FIG. 11B upper “control” row right upper quadrant “EETCWDW” (62.8) vs lower “IdeZ” row, right upper quadrant “EETCWDW” (47.5).

[0392] FIG. 11C shows representative data demonstrating that the higher affinity of EETCWDW rituximab for CD16α leads to greater NK cell depletion of B cells in blood by antibody dependent cellular cytotoxicity (ADCC), and even greater depletion in the presence of IdeZ (“IdeZ”), when compared to WT rituximab. When the NK cell recognizes EETCWDW rituximab binding to the CD19(+) B cell target in blood without IdeZ (“control”), there is 17% greater depletion of CD19(+) B cells compared to the NK cell recognizing WT rituximab binding to the CD19(+) B cell target in control blood (compare FIG. 11C upper “control” row right lower quadrant “WT” (6.0) vs “EETCWDW” (5.0). However, when the NK cell recognizing WT rituximab binding to the CD19(+) B cell target in control blood is compared to the NK cell recognizing WT rituximab binding to the CD19(+) B cell target following incubation with IdeZ, CD19(+) B cell depletion is 63% worse (compare FIG. 11C upper “control” row right lower quadrant “WT” (6.0) vs lower “IdeZ” row right lower quadrant “WT” (9.8). In contrast, when to the NK cell recognizes EETCWDW rituximab binding to the CD19(+) B cell target following incubation with IdeZ, CD19(+) B cell depletion is improved by 50% when compared to NK cells recognizing WT rituximab binding to the CD19(+) B cell target following incubation with control blood (compare FIG. 11C upper “control” row right lower quadrant “WT” (6.0) vs lower “IdeZ” row right lower quadrant “EETCWDW” (3.0).

[0393] In FIG. 11A, it was demonstrated that the higher affinity of EETCWDW rituximab for CD16α (compared to WT rituximab) leads to greater or stronger activation of the NK cell in whole blood, as measured by the downregulation of CD16α. FIG. 12 demonstrates how increasing concentrations of AB serum (and therefore increasing the concentration of endogenous IgG) in blood out competes EETCWDW rituximab for binding to NK cell FcγRIIIA (CD16α), thereby diminishing NK cell activation (compare the ability of NK cells' CD16 to recognize and bind EETCWDW rituximab bound to B cells in blood containing 6.7% serum (14.2% of NK cells down regulate surface expression of CD16) versus the ability of NK cells' CD16 to recognize and bind EETCWDW rituximab bound to B cells in blood containing 40% serum (only 5.5% of NK cells down regulate surface expression of CD16). However, adding IdeZ to the 40% serum substantially removes the endogenous IgG from binding to NK cell FcγRIIIA (CD16α), and allows the NK cells' CD16 to recognize and bind EETCWDW rituximab bound to B cells in blood resulting in an increase of NK cell activation as measured by a substantial downregulation of CD16α (5.5% in 40% AB serum without IdeZ compared to 22.7% in 40% AB serum with IdeZ).

### Example 4

### Rituximab Variants

[0394] Endogenous IgG in human plasma binds Fcγ receptors (R) on all innate immune cells, limiting the access of the exogenously administered therapeutic antibody to FcγR on natural killer (NK) cells, monocytes, macrophages and granulocytes. Rituximab is a CD20 antibody with the human IgG1 constant region. Rituximab's Fab region binds CD20 on B cells and its Fc region binds FcγRIIIa (CD16) and activates NK cells through antibody-dependent cellular cytotoxicity (ADCC), thereby depleting the benign or malignant B cell population. For ADCC to occur, the therapeutic antibody must bind the FcγR innate immune effector cell with its Fc region and it must bind the antigen on the target cell with its Fab region. The discovery focuses on enhancement of (1) the binding affinity and (2) enhancement of the percent occupancy of the therapeutic antibody's Fc region to the number of FcγR expressed on the surface of the innate immune effector cell. The data herein demonstrate these principles using (1) the well-known therapeutic antibody Rituximab, which binds to CD20 and can deplete both normal and malignant B cells; and (2) the human NK cells as an innate immune cell that bears FcγR. The discoveries/inventions described herein are meant to describe a platform that can be adapted for any therapeutic antibody that engages any immune cells through binding FcγRs for part or all of its function.

[0395] One of the challenges with antibody therapy is that it must compete for FcγR binding with the massive amount of endogenous IgG that exists in the human body, and modifications in the hinge region of a therapeutic mAb to improve its binding to FcγR will not fully displace endogenous IgG binding to FcγR on all of the innate immune effector cells. This in turn will limit the therapeutic efficacy of mAb that work via ADCC and/or ADCP. However, it has been demonstrated in humans that intravenous administration of IgG peptidases IdeZ and IdeS cleaves endogenous IgG at the hinge region and completely disrupts endogenous IgG-FcγR binding, leaving the FcγR vacant for binding by the therapeutic mAb. Because so little sequence modification has been focused the IgG hinge region, most all humanized antibodies have the wild type hinge sequence and are therefore sensitive to IdeZ and IdeS cleavage, thus, treatment with IdeZ or IdeS would also cleave the hinge region of the therapeutic mAb. Importantly, the modifications in the hinge region using the CHO cell display produced in any therapeutic mAb strategy can be made to be resistant to cleavage by the IgG peptidases IdeZ and IdeS (FIG. 7 and FIG. 9). Thus, from a practical standpoint, the IgG peptidases IdeZ and IdeS can be administered to patients (Jordan et al.), cleave all endogenous IgG and therefore open all IgG-FcγRs for exclusive binding by the modified mAb, vastly increasing the number of innate immune effector cells armed with the therapeutic mAb and capable of performing ADCC and ADCP. This discovery could therefore dramatically improve the efficacy of therapeutic mAb whose mechanism of action partially or fully occurs via ADCC and ADCP, such as rituximab for the treatment of lymphoma and multiple sclerosis.

[0396] The IdeZ (and IdeS) enzyme cuts human IgG1 right after the first glycine of native ELLGGPS amino acid (AA) hinge sequence of endogenous IgG as well as wild type rituximab, thereby removing both endogenous IgG and wild type rituximab from binding Fcγ receptors, canceling NK cell activation (FIG. 11A, top row) and lowering rituximab-mediated B cell depletion by >50% (i.e., 6% to 9.8%; FIG. 11B, top row). IdeZ did not cut the synthesized rituximab with the novel EETCWDW AA hinge sequence (referred to in FIGS. 8 and 9 as “EETCWDW rituximab”). Thus, the presence of IdeZ did not cancel NK cell activation (FIG. 11A, bottom row), and improved ADCC depletion of B cells (FIG. 11A, bottom row). IdeZ-mediated removal of endogenous IgG from binding to Fcγ receptors presumably created more Fcγ receptor binding for the “EETCWDW rituximab” and therefore boosted NK cell ADCC and B cell depletion by 50% compared to wild type rituximab in the absence of IdeZ (FIG. 11B, 3.0% vs 6.0% residual B cells, respectively).

[0397] When an NK cell engages a therapeutic monoclonal antibody by binding its Fc region to the NK cell's FcγRIII (CD16) and the Fab region to the target cell, the NK cell is activated, ADCC occurs, and CD16 is downregulated on the surface of the NK cell. As plasma or serum increase, the amount of endogenous IgG increases and competitively inhibits the binding of exogenous therapeutic antibody Fc region to the NK cell's CD16, thereby limiting NK cell's ability to bind the therapeutic antibody and activate to kill the intended target by ADCC (FIG. 12; compare 14.2% downregulation of CD16 in 6.7% serum vs 5.5% downregulation of CD16 in 40% serum). With the addition of IdeZ, endogenous IgG is cleaved and cannot bind to CD16, thereby freeing up CD16 binding sites on the NK cell for the IdeZ-resistant “EETCWDW rituximab” to bind and activate the NK cells despite 40% serum (compare 5.5% downregulation of CD16 in the absence of IdeZ to 22.7% downregulation of CD16 in the presence of IdeZ. This leads to improved depletion of the tumor target, which in this case is the B cell in blood (FIG. 11B). These principles are illustrated for the FcγR on NK cells (CD16), but also apply to the FcγR on monocytes, macrophages (CD16 and CD32a) as well as granulocytes (CD64), each of whose FcγRs are normally occupied by endogenous IgG

[0398] An affinity selection process was initiated by generating a library of rituximab by introducing random mutations in the region where rituximab binds to CD20 and the many variants are characterized as having increased or decreased affinity to CD20. The variants were expressed on the surface of CHO cells using as EGFR-TMH fusion proteins and assessed for binding affinity of each variant toward a fluorescently labeled CD20 (FIG. 13). The data in FIG. 13 demonstrates rituximab expressed on the surface of CHO cells as rituximab-EGFR fusion protein. The X axis shows a fluorescently labeled anti-Fc mAb that can bind to CHO cells expressing IgG1-EGFR or rituximab-EGFR. The Y axis shows a fluorescently labeled CD20 molecule that can bind to rituximab-EGFR. In the left histogram, the CHO cells express IgG1 Fc-EGFR, thus binding on the X axis but no binding on the Y axis. The middle histogram expresses rituximab-EGFR and quantifies the affinity rituximab has for CD20. The histogram to the right shows the binding of the fluorescently labeled CD20 molecule to rituximab (Line A), or to a hypothetical variant of rituximab with higher affinity for CD20 compared to the actual rituximab (Line B), or to a hypothetical variant of rituximab with lower affinity for CD20 compared to the actual rituximab (Line C). Right panels show the expression of the CH2-CH3 fragment of Fc on the surface of CHO cells, so no binding by the human fluorescently labeled CD20 molecule.

[0399] FIG. 14 illustrates flow cytometry density plots of sequence-dependent rituximab target selection and corresponding sequences. The representative example shows multiple clones from the rituximab library consisting of CD20 binding variants and flow cytometric measurement of binding affinity for each variant to a fluorescently labeled CD20 molecule, as demonstrated in FIG. 13.

[0400] Rituximab heavy chain CDR1, CDR2, CDR3 and light chain CDR3 are the main regions involved in binding CD20. To test and validate embodiments described herein, a mutation library was made in the heavy chain CDR1, CDR2, and CDR3 respectively, and representative mutants from each library were identified. Those mutants only differ at the specified CDR region. For example, clone A-P01A09 differs from wild type rituximab at heavy chain CDR1, with mutation underlined. Therefore, light chain CDR1, CDR2, and CDR3 are wild type, non-mutated rituximab sequences. Specifically, all variants described herein include wild type rituximab light chain CDR1 (nucleic acid sequence: GCGAGCAGCAGCGTGAGC; amino acid sequence: ASSSVS), light chain CDR2 (nucleic acid sequence: GGAAGCGGCACCAGC; amino acid sequence: GSGTS) and light chain CDR3 (nucleic acid sequence: TGGACCAGCAACCCGCCG; amino acid sequence: WTSNPP).

[0401] The CDR region variants tested are provided in Tables 1-3 below and FIG. 14. The table indicates the clones created and tested in experiments described herein. Each clone has a variant in a single CDR region with the other CDR regions being wildtype or non-mutated rituximab. In this instance, wildtype is the CDR of the anti-CD20 antibody rituximab. The variation in the CDR as compared to the non-variant or “wildtype” CDR is underlined in the table. For instance, Table 1 shows clones with mutations in CDR1 of rituximab (underlined) and having CDR2 and CDR3 the same as non-mutated (also referred to as wildtype (WT)) rituximab. Each clone in Table 1 has a nucleic acid sequence that encodes rituximab except for the noted CDR change relative to rituximab. For example, clone P01A09 in the first row has a variant heavy chain CDR1 (underlined sequence shows specific differences) relative to rituximab, but heavy chain CDR2 and heavy chain CDR3 are non-mutated sequences relative to rituximab. In addition, P01A09 includes non-mutated light chain CDR1, non-mutated light chain CDR2, non-mutated light chain CDR3. Indeed, the sequence of P01A09 matches the sequence of rituximab except for variant heavy chain CDR1.

TABLE 1

| | Nucleic Acid | Amino Acid |
|---|---|---|
| | Heavy chain CDRI WT: | Heayy chain CDRI WT: |
| | TATACCTTCACAAGCTATAAC | YTFTSYN |
| CLONES | (SEQ ID NO: 548) | (SEQ ID NO: 589) |
| P01A09 | TATACCGGGGAAGCGGTATAAC | YTGKRYN |
| | (SEQ ID NO: 551) | (SEQ ID NO: 592) |
| P01B01 | TATACCTGTTTTAGGTATAAC | YTCFRYN |
| | (SEQ ID NO: 552) | (SEQ ID NO: 593) |
| P02C12 | TATACCTTCACAATTCGTTTG | YTFTIRL |
| | (SEQ ID NO: 553) | (SEQ ID NO: 594) |
| P02F01 | TATACCGGGCGTTTTTATAAC | YTGRFYN |
| | (SEQ ID NO: 554) | (SEQ ID NO: 595) |
| P03A05 | TATACCAGTTGGATGTATAAC | YTSWMYN |
| | (SEQ ID NO: 555) | (SEQ ID NO: 596) |
| P05B09 | TGGTTGTGGACAAGCTATAAC | WLWTSYN |
| | (SEQ ID NO: 556) | (SEQ ID NO: 597) |
| P05H07 | TATACCTGGGGGATTTATAAC | YTWGIYN |
| | (SEQ ID NO: 557) | (SEQ ID NO: 598) |
| P04A02 | TATACCTTCACAAGGTATAAT | YTFTRYN |
| | (SEQ ID NO: 558) | (SEQ ID NO: 599) |
| P05F06 | TATACCTTCACATTTCCTTAT | YTFTFPY |
| | (SEQ ID NO: 559) | (SEQ ID NO: 600) |
| P07C04 | TATACCGGTATTCGGTATAAC | YTGIRYN |
| | (SEQ ID NO: 560) | (SEQ ID NO: 601) |

TABLE 2
CDR2 Variants

| | Nucleic Acid | Amino Acid |
|---|---|---|
| | Heavy chain CDR2 WT: | Heavy chain CDR2 WT: |
| | ATTTATCCGGGCAACGGCGAT | IYPGNGD |
| CLONES | (SEQ ID NO: 549) | (SEQ ID NO: 590) |
| P04D06 | ATTTATCCGGGCTTGTATCTT | IYPGLYL |
| | (SEQ ID NO: 561) | (SEQ ID NO: 602) |
| P04F01 | ATTTATCCGGGCACGCTGCTG | IYPGTLL |
| | (SEQ ID NO: 562) | (SEQ ID NO: 603) |
| P04F02 | ATTTATCCGGGCCATATGGGG | IYPGHMG |
| | (SEQ ID NO: 563) | (SEQ ID NO: 604) |
| P04G03 | ATTTATCCGGGCATGCTTTGG | IYPGMLW |
| | (SEQ ID NO: 564) | (SEQ ID NO: 605) |
| P04H06 | ATTTATCCGGGCGCTGTTTCG | IYPGAVS |
| | (SEQ ID NO: 565) | (SEQ ID NO: 606) |
| P04H07 | ATTTATCCGGGCACTCATAAG | IYPGTHK |
| | (SEQ ID NO: 566) | (SEQ ID NO: 607) |
| P06A06 | ATTTATCCGGGCACTCAGTCT | IYPGTQS |
| | (SEQ ID NO: 567) | (SEQ ID NO: 608) |
| P06B11 | ATTTATCCGGGCAATGCGGAT | IYPGNAD |
| | (SEQ ID NO: 568) | (SEQ ID NO: 609) |
| P06H01 | ATTTATCCGGGCAGTTTTGAG | IYPGSFE |
| | (SEQ ID NO: 569) | (SEQ ID NO: 610) |
| P04D09 | ATTTATCCGGGCACGTTTCTT | IYPGTFL |
| | (SEQ ID NO: 570) | (SEQ ID NO: 611) |
| P05A03 | ATTTATCCGGTTACGGGCGAT | IYPVTGD |
| | (SEQ ID NO: 571) | (SEQ ID NO: 612) |
| P05A12 | ATTTATCCGTATCTGGGCGAT | IYPYLGD |
| | (SEQ ID NO: 572) | (SEQ ID NO: 613) |
| P05B02 | ATTTATCCGTGGAATGGCGAT | IYPWNGD |
| | (SEQ ID NO: 573) | (SEQ ID NO: 614) |
| P06B04 | ATTTATCCTCTGTGGGGCGAT | IYPLWGD |
| | (SEQ ID NO: 574) | (SEQ ID NO: 615) |
| P06B11 | ATTTATCCGGGCAGTAGTCGT | IYPGSSR |
| | (SEQ ID NO: 575) | (SEQ ID NO: 616) |
| P06H05 | ATTTATCCGGGCACTTTTCGT | IYPGTFR |
| | (SEQ ID NO: 576) | (SEQ ID NO: 617) |
| P06H11 | ATTTATCCGGGCGTTGGTCGG | IYPGVGR |
| | (SEQ ID NO: 577) | (SEQ ID NO: 618) |
| P07F02 | ATTTATCCGGGCTCTCAGGCG | IYPGSEA |
| | (SEQ ID NO: 578) | (SEQ ID NO: 619) |
| P07F10 | ATTTATCCGGGCAGTAATATG | IYPGSNM |
| | (SEQ ID NO: 579) | (SEQ ID NO: 620) |
| P08B05 | ATTTATCCGGGCGCTTTTCTT | IYPGAFL |
| | (SEQ ID NO: 580) | (SEQ ID NO: 621) |

TABLE 3
CDR3 Variants

| | Nucleic Acid | |
|---|---|---|
| | Heavy chain CDR3 WT: | Amino Acid |
| | CGCAGCACCTATTATGGCGG | Heavy chain CDR3 WT: |
| | CGATTGGTATTTTAAC | RSTYYGGDWYFN |
| CLONES | (SEQ ID NO: 550) | (SEQ ID NO: 591) |
| P07C02 | CAGTCTATTTATTATGGCGG | QSIYYGGDWYFN |
| | CGATTGGTATTTTAAC | (SEQ ID NO: 622) |
| | (SEQ ID NO: 581) | |
| P07H08 | CGCAGCACCTATTATGGCGG | RSTYYGGDWLIA |
| | CGATTGGCTGATTGCT | (SEQ ID NO: 623) |
| | (SEQ ID NO: 582) | |
| P07H10 | CGCAGCACCGTGGCGGGGGG | RSTVAGGDWYFN |
| | CGATTGGTATTTTAAC | (SEQ ID NO: 624) |
| | (SEQ ID NO: 583) | |
| P08A01 | CGCAGCACCTATTATGGCGG | RSTYYGGDWRWR |
| | CGATTGGCGGTGGCGG | (SEQ ID NO: 625) |
| | (SEQ ID NO: 584) | |
| P08B11 | CGCAGCACCTATTATGGCGG | RSTYYGGFWYFN |
| | GTTTTGGTATTTTAAC | (SEQ ID NO: 626) |
| | (SEQ ID NO: 585) | |
| P08G02 | CGCAGCACCTATTATGGCGG | RSTYYGGDWSWA |
| | CGATTGGTCTTGGGCT | (SEQ ID NO: 627) |
| | (SEQ ID NO: 586) | |
| P07A06 | CGCAGCACCATGTGTAAGGG | RSTMCKGDWYFN |
| | CGATTGGTATTTTAAC | (SEQ ID NO: 628) |
| | (SEQ ID NO: 587) | |
| P08E05 | CGCAGCACCATGTTGGGTGG | RSTMLGGDWYFN |
| | CGATTGGTATTTTAAC | (SEQ ID NO: 629) |
| | (SEQ ID NO: 588) | |

[0402] FIG. 15 illustrates the progressive acquisition of IdeS resistance by single amino acid substitution. The first leucine (L248) upstream of IdeS/Z cleavage site was mutated to the other 19 amino acids individually. Wild-type or single amino acid mutants of rituximab were expressed on CHO cells as type I membrane proteins and tested for their expression and binding to human CD16α using fluorescent labeled anti-human IgG Fc and CD16α ectodomain. The L248E and L248D mutations acquired significant IdeS resistance with only slight loss of CD16α binding.

[0403] FIG. 16 illustrates the binding of wild-type, L248E, and L248D hinge mutant rituximab to human FcγRs. Wild-type or the single amino acid mutants of rituximab (L248E and L248E) were expressed on CHO cells as type I membrane proteins and tested for their expression and binding to human FcγRs using fluorescent labeled anti-human Fc and different human FcγR ectodomains. The L248E and L248D mutations had a slight decrease in affinity for CD16α, CD16β, and CD32α, and had an increase in affinity for CD64 as compared to the wild-type protein.

### REFERENCES

[0404] 1. Chen Zhou, Frederick W Jacobsen, Ling Cai, Qing Chen, and Weyen David Shen. Development of a novel mammalian cell surface antibody display platform. MAbs. 2010 September-October; 2(5): 508-518.
[0405] 2. Cumbers S J, Williams G T, Davies S L, Grenfell R L, Takeda S, Batista F D, et al. Generation and iterative affinity maturation of antibodies in vitro using hypermutating B-cell lines. Nat Biotechnol. 2002; 20:1129-1134.
[0406] 3. Ho M, Nagata S, Pastan I. Isolation of anti-CD22 Fv with high affinity by Fv display on human cells. P Natl Acad Sci USA. 2006; 102:9637-9642.
[0407] 4. Urban J H, Schneider R M, Compe M, Finger C, Cichutek K, Alvarez-Vallina L, et al. Selection of functional human antibodies from retroviral display libraries. Nucleic Acids Res. 2005:33-35.
[0408] 5. Wolkowicz R, Jager G C, Nolan G P. A random peptide library fused to CCR5 for selection of mimetopes expressed on the mammalian cell surface via retroviral vectors. J Biol Chem. 2005; 280:15195-15201.
[0409] 6. Zauderer M, Smith E S. In vitro methods of producing and identifying immunoglobulin molecules in eukaryotic cells. US patent application 2002-0123057A1.
[0410] 7. Akamatsu Y, Pakabunto K, Xu Z, Zhang Y, Tsurushia N. Whole IgG surface display on mammalian cells: Application to isolation of neutralizing chicken monoclonal anti-IL-12 antibodies. J Immunol Methods. 2007; 327:40-52.
[0411] 8. Beerli R R, Bauer M, Buser R B, Gwerder M, Muntwiler S, Maurer P, et al. Isolation of human monoclonal antibodies by mammalian cell display. P Natl Acad Sci USA. 2008; 105:14336-14341.
[0412] 9. Higuchi K, Araki T, Matsuzaki O, Sato A, Kanno K, Kitaguchi N, et al. Cell display library for gene cloning of variable regions of human antibodies to hepatitis B surface antigen. J Immunol Methods. 1997; 202:193-204.
[0413] 10. Jordan et al N Engl J Med 2017; 377:442-453; 2017.

1. An immunoglobulin G (IgG) antibody comprising a Fab region and an Fc region connected through a hinge region, wherein:
(a) the hinge region is resistant to cleavage by a protease,
(b) the Fc region has a dissociation constant of about 1×10⁻⁵ M to about 1×10⁻¹³ M to one or more of CD32 (FcγRII), CD16 (FcγRIII), and CD64 (FcγRI), or
(c) the hinge region is resistant to cleavage by a protease and the Fc region has a dissociation constant of about 1×10⁻⁵ M to about 1×10⁻¹³ M to one or more of CD32 (FcγRII), CD16 (FcγRIII), and CD64 (FcγRI).

2. The IgG antibody of claim 1, wherein the IgG antibody is an IgG1 antibody, an IgG2 antibody, an IgG3 antibody, or an IgG4 antibody.

3. The IgG antibody of claim 1, wherein the hinge region is resistant to cleavage by a protease.

4-6. (canceled)

7. The IgG antibody of claim 1, wherein the hinge region comprises a protease resistant sequence between amino acid positions 246-252 according to Kabat numbering.

8-11. (canceled)

12. The IgG antibody of claim 7, wherein the protease resistant sequence comprises the amino acid sequence of SEQ ID NO:545, SEQ ID NO:546, or SEQ ID NO:547.

13. The IgG antibody of claim 7, wherein the protease resistant sequence comprises the amino acid sequence selected from the group consisting of DW, YD, QW, QE, PW, QD, DD, CWDW, ETCWDW, DSCWDW, YDCWDW, DDCWDW, DMCWDW, EHCWDW, IICWDW, DVCWDW, EFCWDW, FNCWDW, EETCWDW (SEQ ID NO: 545), EDSCWDW (SEQ ID NO: 546), EETCWDD, EETCWSW (SEQ ID NO: 547), and EETQWDD.

14. The IgG antibody of claim 7, wherein the protease resistant sequence comprises the amino acid sequence of SEQ ID NO:545.

15. The IgG antibody of claim 1, wherein the Fc region has a dissociation constant of about 1×10⁻⁵ M to about 1×10⁻¹³ M to one or more of CD32 (FcγRII), CD16 (FcγRIII), and CD64 (FcγRI).

16-22. (canceled)

23. The IgG antibody of claim 1, wherein the protease is selected from the group consisting of IdeS, IdeZ, pepsin, matrix metalloproteinase 7, matrix metalloproteinase 3, matrix metalloproteinase, cathepsin G, and glutamyl endopeptidase V8.

24-25. (canceled)

26. The IgG antibody of claim 1, wherein the Fc region comprises an amino acid substitution selected from S252D, I351E, and A349L according to the EU numbering of Kabat and wherein the substitution confers higher binding affinity for CD16 (FcγRIII) compared to wild type IgG antibody.

27-45. (canceled)

46. A recombinant protein comprising:
(i) a Type I transmembrane domain; and
(ii) the immunoglobulin G (IgG) antibody of claim 1;
wherein the Type I transmembrane domain is fused to the C-terminus of the IgG antibody; and wherein the recombinant protein is resistant to cleavage by a protease.

47. The recombinant protein of claim 46, wherein the Type I transmembrane domain is capable of dimerization.

48. The recombinant protein of any one of claim 46, wherein the Type I transmembrane domain is selected from the group consisting of an EGFR, a PDGFR-alpha, a PDGFR-beta, a HER2, a HER3, a HER4, a FGFR1, a FGFR2, a FGFR3, a FGFR4, a VEGFR1, a VEGFR2, a VEGFR3, a Trk-A, a Trk-B, a Trk-C, and an insulin receptor transmembrane domain.

49. The recombinant protein of claim 46, wherein the Type I transmembrane domain is an EGFR transmembrane domain.

50-98. (canceled)

99. An isolated nucleic acid capable of encoding the recombinant protein of claim 46.

100. An expression vector comprising a nucleic acid capable of encoding the recombinant protein of claim 46.

101. A cell comprising the expression vector of claim 100.

102-104. (canceled)

105. An anti-CD20 antibody comprising a complementarity determining region (CDR) as encoded by a nucleic acid sequence of any one of SEQ ID NOS:551-588.

106. A method of binding a ligand to a CHO cell surface recombinant protein, the method comprising contacting a ligand with a CHO cell surface recombinant protein, wherein the CHO cell surface recombinant protein comprises:
(i) an EGFR-transmembrane domain; and
(ii) the immunoglobulin G (IgG) antibody of claim 1;
wherein the EGFR-transmembrane domain is fused to the C-terminus of the IgG antibody; wherein the IgG antibody is capable of binding a ligand; and wherein the CHO cell surface protein is resistant to cleavage by an IgG-specific protease or has higher binding affinity for one or more of CD32 (FcγRII), CD16 (FcγRIII), and CD64 (FcγRI).

107. A method of treating cancer in a patient in need thereof, the method comprising administering to the patient an effective amount of the IgG antibody of claim 1 and an IgG specific protease.

108. (canceled)

The application's sequence listing, which the Patent Office published only in electronic form, follows.

SEQUENCE LISTING (635 sequences)

SEQ ID NO: 1 - DNA, 705 bp, Artificial sequence
  Synthetic polynucleotide
  misc_feature: Rituximab light chain, DNA
atggccctccctgtcaccgccctgctgcttccgctggctcttctgctccacgccgctcggccccagattgtgctgagccagagcccggcgattctgagcgcgagcccgggcgaaaaagtgaccatgacctgccgcgcgagcagcagcgtgagctatattcattggtttcagcagaaaccgggcagcagcccgaaaccgtggatttatgcgaccagcaacctggcgagcggcgtgccggtgcgctttagcggctcaggaagcggcaccagctatagcctgaccattagccgcgtggaagcggaagatgcggcgacctattattgccagcagtggaccagcaacccgccgacctttggcggcggcaccaaactggaaattaaacgcacggtggcggctccatctgtcttcatcttcccgccatctgatgagcagttgaaatctggaactgcctctgttgtgtgcctgctgaataacttctatcccagagaggccaaagtacagtggaaggtggataacgccctccaatcgggtaactcccaggagagtgtcacagagcaggacagcaaggacagcacctacagcctcagcagcaccctgacgctgagcaaagcagactacgagaaacacaaagtctacgcctgcgaagtcacccatcagggcctgagctcgcccgtcacaaagagcttcaacaggggagagtgttag

SEQ ID NO: 2 - DNA, 1413 bp, Artificial sequence
  Synthetic polynucleotide
  misc_feature: Rituximab heavy chain, DNA
atggactggacctggaggatcctcttcttggtggcagccgctacaggcgcgcactcccaagtacaactacaacaacctggtgcagaactggttaaaccaggtgcaagtgtgaaaatgagctgcaaagcgagcggctataccttcacaagctataacatgcattgggtgaaacagaccccgggccgcggcctggaatggattggcgcgatttatccgggcaacggcgataccagctataaccagaaatttaaaggcaaagcgaccctgaccgcggataaaagcagcagcaccgcgtatatgcagctgagcagcctgaccagcgaagatagcgcggtgtattattgcgcgcgcagcacctattatggcggcgattggtattttaacgtgtggggcgcgggcaccaccgtgaccgtgagcgcggctagcaccaagggcccatcggtcttccccctggcaccctcctccaagagcacctctgggggcacagcggccctgggctgcctggtcaaggactacttccccgaaccggtgacggtgtcgtggaactcaggcgctctgaccagcggcgtgcacaccttcccggctgtcctacagtcctcaggactctactccctcagcagcgtggtgaccgtgccctccagcagcttgggcacccagacctacatctgcaacgtgaatcacaagcccagcaacaccaaggtggacaagaaagttgagcccaaatcttgtgacaaaactcacacatgcccaccgtgcccagcacctgaactcctggggggaccgtcagtcttcctcttccccccaaaacccaaggacaccctcatgatctcccggacccctgaggtcacatgcgtggtggtggacgtgagccacgaagaccctgaggtcaagttcaactggtacgtggacggcgtggaggtgcataatgccaagacaaagccgcgggaggagcagtacaacagcacgtaccgggtggtcagcgtcctcaccgtcctgcaccaggactggctgaatggcaaggagtacaagtgcaaagtctccaacaaagccctcccagcccccatcgagaaaaccatctccaaagccaaagggcagccccgagaaccacaggtgtacaccctgcccccatcccgggatgagctgaccaagaaccaggtcagcctgacctgcctggtcaaaggcttctatcccagcgacatcgccgtggagtgggagagcaatgggcagccggagaacaactacaagaccacgcctcccgtgctggactccgacggctccttcttcctctacagcaagctcaccgtggacaagagcaggtggcagcaggggaacgtcttctcatgctccgtgatgcatgaggctctgcacaaccactacacgcagaagagtctctccctgtctccgggtaaatga

SEQ ID NO: 3 - protein, 234 aa, Artificial sequence
  Synthetic polypeptide
  misc_feature: Rituximab light chain, amino acid
MALPVTALLLPLALLLHAARPQIVLSQSPAILSASPGEKVTMTCRASSSVSYIHWFQQKPGSSPKPWIYATSNLASGVPVRFSGSGSGTSYSLTISRVEAEDAATYYCQQWTSNPPTFGGGTKLEIKRTVAAPSVFIFPPSDEQLKSGTASVVCLLNNFYPREAKVQWKVDNALQSGNSQESVTEQDSKDSTYSLSSTLTLSKADYEKHKVYACEVTHQGLSSPVTKSFNRGEC

SEQ ID NO: 4 - protein, 470 aa, Artificial sequence
  Synthetic polypeptide
  misc_feature: Rituximab heavy chain, amino acid
MDWTWRILFLVAAATGAHSQVQLQQPGAELVKPGASVKMSCKASGYTFTSYNMHWVKQTPGRGLEWIGAIYPGNGDTSYNQKFKGKATLTADKSSSTAYMQLSSLTSEDSAVYYCARSTYYGGDWYFNVWGAGTTVTVSAASTKGPSVFPLAPSSKSTSGGTAALGCLVKDYFPEPVTVSWNSGALTSGVHTFPAVLQSSGLYSLSSVVTVPSSSLGTQTYICNVNHKPSNTKVDKKVEPKSCDKTHTCPPCPAPELLGGPSVFLFPPKPKDTLMISRTPEVTCVVVDVSHEDPEVKFNWYVDGVEVHNAKTKPREEQYNSTYRVVSVLTVLHQDWLNGKEYKCKVSNKALPAPIEKTISKAKGQPREPQVYTLPPSRDELTKNQVSLTCLVKGFYPSDIAVEWESNGQPENNYKTTPPVLDSDGSFFLYSKLTVDKSRWQQGNVFSCSVMHEALHNHYTQKSLSLSPGK

SEQ ID NO: 5 - DNA, 132 bp, Artificial sequence
  Synthetic polynucleotide
  misc_feature: EGFR transmembrane sequence, DNA
gaaggctgtccaacgaatgggcctaagatcccgtccatcgccactgggatggtgggggccctcctcttgctgctggtggtggccctggggatcggcctcttcatgcgaaggcgccacatcgttcggaagcgc

SEQ ID NO: 6 - protein, 44 aa, Artificial sequence
  Synthetic polypeptide
  misc_feature: EGFR transmembrane sequence, amino acid
EGCPTNGPKIPSIATGMVGALLLLLVVALGIGLFMRRRHIVRKR

SEQ ID NO: 7 - DNA, 63 bp, Artificial sequence
  Synthetic polynucleotide
  misc_feature: signal peptide, DNA
atggccctccctgtcaccgccctgctgcttccgctggctcttctgctccacgccgctcggccc

SEQ ID NO: 8 - protein, 21 aa, Artificial sequence
  Synthetic polypeptide
  misc_feature: signal peptide, amino acid
MALPVTALLLPLALLLHAARP

SEQ ID NO: 9 - DNA, 1542 bp, Artificial sequence
  Synthetic polynucleotide
  misc_feature: rituximab heavy chain-EGFR, DNA
atggactggacctggaggatcctcttcttggtggcagccgctacaggcgcgcactcccaagtacaactacaacaacctggtgcagaactggttaaaccaggtgcaagtgtgaaaatgagctgcaaagcgagcggctataccttcacaagctataacatgcattgggtgaaacagaccccgggccgcggcctggaatggattggcgcgatttatccgggcaacggcgataccagctataaccagaaatttaaaggcaaagcgaccctgaccgcggataaaagcagcagcaccgcgtatatgcagctgagcagcctgaccagcgaagatagcgcggtgtattattgcgcgcgcagcacctattatggcggcgattggtattttaacgtgtggggcgcgggcaccaccgtgaccgtgagcgcggctagcaccaagggcccatcggtcttccccctggcaccctcctccaagagcacctctgggggcacagcggccctgggctgcctggtcaaggactacttccccgaaccggtgacggtgtcgtggaactcaggcgctctgaccagcggcgtgcacaccttcccggctgtcctacagtcctcaggactctactccctcagcagcgtggtgaccgtgccctccagcagcttgggcacccagacctacatctgcaacgtgaatcacaagcccagcaacaccaaggtggacaagaaagttgagcccaaatcttgtgacaaaactcacacatgcccaccgtgcccagcacctgaactcctggggggaccgtcagtcttcctcttccccccaaaacccaaggacaccctcatgatctcccggacccctgaggtcacatgcgtggtggtggacgtgagccacgaagaccctgaggtcaagttcaactggtacgtggacggcgtggaggtgcataatgccaagacaaagccgcgggaggagcagtacaacagcacgtaccgggtggtcagcgtcctcaccgtcctgcaccaggactggctgaatggcaaggagtacaagtgcaaagtctccaacaaagccctcccagcccccatcgagaaaaccatctccaaagccaaagggcagccccgagaaccacaggtgtacaccctgcccccatcccgggatgagctgaccaagaaccaggtcagcctgacctgcctggtcaaaggcttctatcccagcgacatcgccgtggagtgggagagcaatgggcagccggagaacaactacaagaccacgcctcccgtgctggactccgacggctccttcttcctctacagcaagctcaccgtggacaagagcaggtggcagcaggggaacgtcttctcatgctccgtgatgcatgaggctctgcacaaccactacacgcagaagagtctctccctgtctccgggtaaagaaggctgtccaacgaatgggcctaagatcccgtccatcgccactgggatggtgggggccctcctcttgctgctggtggtggccctggggatcggcctcttcatgcgaaggcgccacatcgttcggaagcgc

SEQ ID NO: 10 - protein, 514 aa, Artificial sequence
  Synthetic polypeptide
  misc_feature: rituximab heavy chain-EGFR, amino acid
MDWTWRILFLVAAATGAHSQVQLQQPGAELVKPGASVKMSCKASGYTFTSYNMHWVKQTPGRGLEWIGAIYPGNGDTSYNQKFKGKATLTADKSSSTAYMQLSSLTSEDSAVYYCARSTYYGGDWYFNVWGAGTTVTVSAASTKGPSVFPLAPSSKSTSGGTAALGCLVKDYFPEPVTVSWNSGALTSGVHTFPAVLQSSGLYSLSSVVTVPSSSLGTQTYICNVNHKPSNTKVDKKVEPKSCDKTHTCPPCPAPELLGGPSVFLFPPKPKDTLMISRTPEVTCVVVDVSHEDPEVKFNWYVDGVEVHNAKTKPREEQYNSTYRVVSVLTVLHQDWLNGKEYKCKVSNKALPAPIEKTISKAKGQPREPQVYTLPPSRDELTKNQVSLTCLVKGFYPSDIAVEWESNGQPENNYKTTPPVLDSDGSFFLYSKLTVDKSRWQQGNVFSCSVMHEALHNHYTQKSLSLSPGKEGCPTNGPKIPSIATGMVGALLLLLVVALGIGLFMRRRHIVRKR

SEQ ID NO: 11 - DNA, 690 bp, Artificial sequence
  Synthetic polynucleotide
  misc_feature: IgG1Fc, DNA
gagcccaaatcttgtgacaaaactcacacatgcccaccgtgcccagcacctgaactcctggggggaccgtcagtcttcctcttccccccaaaacccaaggacaccctcatgatctcccggacccctgaggtcacatgcgtggtggtggacgtgagccacgaagaccctgaggtcaagttcaactggtacgtggacggcgtggaggtgcataatgccaagacaaagccgcgggaggagcagtacaacagcacgtaccgggtggtcagcgtcctcaccgtcctgcaccaggactggctgaatggcaaggagtacaagtgcaaggtctccaacaaagccctcccagcccccatcgagaaaaccatctccaaagccaaagggcagccccgagaaccacaggtgtacaccctgcccccatcccgggatgagctgaccaagaaccaggtcagcctgacctgcctggtcaaaggcttctatcccagcgacatcgccgtggagtgggagagcaatgggcagccggagaacaactacaagaccacgcctcccgtgctggactccgacggctccttcttcctctacagcaagctcaccgtggacaagagcaggtggcagcaggggaacgtcttctcatgctccgtgatgcatgaggctctgcacaaccactacacgcagaagagcctctccctgtctccg

SEQ ID NO: 12 - protein, 230 aa, Artificial sequence
  Synthetic polypeptide
  misc_feature: IgG1Fc, amino acid
EPKSCDKTHTCPPCPAPELLGGPSVFLFPPKPKDTLMISRTPEVTCVVVDVSHEDPEVKFNWYVDGVEVHNAKTKPREEQYNSTYRVVSVLTVLHQDWLNGKEYKCKVSNKALPAPIEKTISKAKGQPREPQVYTLPPSRDELTKNQVSLTCLVKGFYPSDIAVEWESNGQPENNYKTTPPVLDSDGSFFLYSKLTVDKSRWQQGNVFSCSVMHEALHNHYTQKSLSLSP

SEQ ID NO: 13 - DNA, 822 bp, Artificial sequence
  Synthetic polynucleotide
  misc_feature: IgG1Fc-EGFR, DNA
gagcccaaatcttgtgacaaaactcacacatgcccaccgtgcccagcacctgaactcctggggggaccgtcagtcttcctcttccccccaaaacccaaggacaccctcatgatctcccggacccctgaggtcacatgcgtggtggtggacgtgagccacgaagaccctgaggtcaagttcaactggtacgtggacggcgtggaggtgcataatgccaagacaaagccgcgggaggagcagtacaacagcacgtaccgggtggtcagcgtcctcaccgtcctgcaccaggactggctgaatggcaaggagtacaagtgcaaggtctccaacaaagccctcccagcccccatcgagaaaaccatctccaaagccaaagggcagccccgagaaccacaggtgtacaccctgcccccatcccgggatgagctgaccaagaaccaggtcagcctgacctgcctggtcaaaggcttctatcccagcgacatcgccgtggagtgggagagcaatgggcagccggagaacaactacaagaccacgcctcccgtgctggactccgacggctccttcttcctctacagcaagctcaccgtggacaagagcaggtggcagcaggggaacgtcttctcatgctccgtgatgcatgaggctctgcacaaccactacacgcagaagagcctctccctgtctccggaaggctgtccaacgaatgggcctaagatcccgtccatcgccactgggatggtgggggccctcctcttgctgctggtggtggccctggggatcggcctcttcatgcgaaggcgccacatcgttcggaagcgc

SEQ ID NO: 14 - protein, 274 aa, Artificial sequence
  Synthetic polypeptide
  misc_feature: IgG1Fc-EGFR, amino acid
EPKSCDKTHTCPPCPAPELLGGPSVFLFPPKPKDTLMISRTPEVTCVVVDVSHEDPEVKFNWYVDGVEVHNAKTKPREEQYNSTYRVVSVLTVLHQDWLNGKEYKCKVSNKALPAPIEKTISKAKGQPREPQVYTLPPSRDELTKNQVSLTCLVKGFYPSDIAVEWESNGQPENNYKTTPPVLDSDGSFFLYSKLTVDKSRWQQGNVFSCSVMHEALHNHYTQKSLSLSPEGCPTNGPKIPSIATGMVGALLLLLVVALGIGLFMRRRHIVRKR

SEQ ID NO: 15 - DNA, 624 bp, Artificial sequence
  Synthetic polynucleotide
  misc_feature: IgG1FcDelta16, DNA
gtcttcctcttccccccaaaacccaaggacaccctcatgatctcccggacccctgaggtcacatgcgtggtggtggacgtgagccacgaagaccctgaggtcaagttcaactggtacgtggacggcgtggaggtgcataatgccaagacaaagccgcgggaggagcagtacaacagcacgtaccgggtggtcagcgtcctcaccgtcctgcaccaggactggctgaatggcaaggagtacaagtgcaaagtctccaacaaagccctcccagcccccatcgagaaaaccatctccaaagccaaagggcagccccgagaaccacaggtgtacaccctgcccccatcccgggatgagctgaccaagaaccaggtcagcctgacctgcctggtcaaaggcttctatcccagcgacatcgccgtggagtgggagagcaatgggcagccggagaacaactacaagaccacgcctcccgtgctggactccgacggctccttcttcctctacagcaagctcaccgtggacaagagcaggtggcagcaggggaacgtcttctcatgctccgtgatgcatgaggctctgcacaaccactacacgcagaagagtctctccctgtctccgggtaaa

SEQ ID NO: 16 - protein, 208 aa, Artificial sequence
  Synthetic polypeptide
  misc_feature: IgG1FcDelta16, amino acid
VFLFPPKPKDTLMISRTPEVTCVVVDVSHEDPEVKFNWYVDGVEVHNAKTKPREEQYNSTYRVVSVLTVLHQDWLNGKEYKCKVSNKALPAPIEKTISKAKGQPREPQVYTLPPSRDELTKNQVSLTCLVKGFYPSDIAVEWESNGQPENNYKTTPPVLDSDGSFFLYSKLTVDKSRWQQGNVFSCSVMHEALHNHYTQKSLSLSPGK

SEQ ID NO: 17 - DNA, 750 bp, Artificial sequence
  Synthetic polynucleotide
  misc_feature: IgG1FcDELTA16-EGFR, DNA
gtcttcctcttccccccaaaacccaaggacaccctcatgatctcccggacccctgaggtcacatgcgtggtggtggacgtgagccacgaagaccctgaggtcaagttcaactggtacgtggacggcgtggaggtgcataatgccaagacaaagccgcgggaggagcagtacaacagcacgtaccgggtggtcagcgtcctcaccgtcctgcaccaggactggctgaatggcaaggagtacaagtgcaaggtctccaacaaagccctcccagcccccatcgagaaaaccatctccaaagccaaagggcagccccgagaaccacaggtgtacaccctgcccccatcccgggatgagctgaccaagaaccaggtcagcctgacctgcctggtcaaaggcttctatcccagcgacatcgccgtggagtgggagagcaatgggcagccggagaacaactacaagaccacgcctcccgtgctggactccgacggctccttcttcctctacagcaagctcaccgtggacaagagcaggtggcagcaggggaacgtcttctcatgctccgtgatgcatgaggctctgcacaaccactacacgcagaagagcctctccctgtctccggaaggctgtccaacgaatgggcctaagatcccgtccatcgccactgggatggtgggggccctcctcttgctgctggtggtggccctggggatcggcctcttcatgcgaaggcgccacatcgttcggaagcgc

SEQ ID NO: 18 - protein, 250 aa, Artificial sequence
  Synthetic polypeptide
  misc_feature: IgG1FcDELTA16-EGFR, amino acid
VFLFPPKPKDTLMISRTPEVTCVVVDVSHEDPEVKFNWYVDGVEVHNAKTKPREEQYNSTYRVVSVLTVLHQDWLNGKEYKCKVSNKALPAPIEKTISKAKGQPREPQVYTLPPSRDELTKNQVSLTCLVKGFYPSDIAVEWESNGQPENNYKTTPPVLDSDGSFFLYSKLTVDKSRWQQGNVFSCSVMHEALHNHYTQKSLSLSPEGCPTNGPKIPSIATGMVGALLLLLVVALGIGLFMRRRHIVRKR

SEQ ID NO: 19 - protein, 251 aa, Artificial sequence
  Synthetic polypeptide
  misc_feature: IgG1FcDELTA16_S, amino acid
SVFLFPPKPKDTLMISRTPEVTCVVVDVSHEDPEVKFNWYVDGVEVHNAKTKPREEQYNSTYRVVSVLTVLHQDWLNGKEYKCKVSNKALPAPIEKTISKAKGQPREPQVYTLPPSRDELTKNQVSLTCLVKGFYPSDIAVEWESNGQPENNYKTTPPVLDSDGSFFLYSKLTVDKSRWQQGNVFSCSVMHEALHNHYTQKSLSLSPEGCPTNGPKIPSIATGMVGALLLLLVVALGIGLFMRRRHIVRKR

SEQ ID NO: 20 - protein, 251 aa, Artificial sequence
  Synthetic polypeptide
  misc_feature: IgG1FcDELTA16_F, amino acid
FVFLFPPKPKDTLMISRTPEVTCVVVDVSHEDPEVKFNWYVDGVEVHNAKTKPREEQYNSTYRVVSVLTVLHQDWLNGKEYKCKVSNKALPAPIEKTISKAKGQPREPQVYTLPPSRDELTKNQVSLTCLVKGFYPSDIAVEWESNGQPENNYKTTPPVLDSDGSFFLYSKLTVDKSRWQQGNVFSCSVMHEALHNHYTQKSLSLSPEGCPTNGPKIPSIATGMVGALLLLLVVALGIGLFMRRRHIVRKR

SEQ ID NO: 21 - protein, 251 aa, Artificial sequence
  Synthetic polypeptide
  misc_feature: IgG1FcDELTA16_Y, amino acid
YVFLFPPKPKDTLMISRTPEVTCVVVDVSHEDPEVKFNWYVDGVEVHNAKTKPREEQYNSTYRVVSVLTVLHQDWLNGKEYKCKVSNKALPAPIEKTISKAKGQPREPQVYTLPPSRDELTKNQVSLTCLVKGFYPSDIAVEWESNGQPENNYKTTPPVLDSDGSFFLYSKLTVDKSRWQQGNVFSCSVMHEALHNHYTQKSLSLSPEGCPTNGPKIPSIATGMVGALLLLLVVALGIGLFMRRRHIVRKR

SEQ ID NO: 22 - protein, 251 aa, Artificial sequence
  Synthetic polypeptide
  misc_feature: IgG1FcDELTA16_L, amino acid
LVFLFPPKPKDTLMISRTPEVTCVVVDVSHEDPEVKFNWYVDGVEVHNAKTKPREEQYNSTYRVVSVLTVLHQDWLNGKEYKCKVSNKALPAPIEKTISKAKGQPREPQVYTLPPSRDELTKNQVSLTCLVKGFYPSDIAVEWESNGQPENNYKTTPPVLDSDGSFFLYSKLTVDKSRWQQGNVFSCSVMHEALHNHYTQKSLSLSPEGCPTNGPKIPSIATGMVGALLLLLVVALGIGLFMRRRHIVRKR

SEQ ID NO: 23 - protein, 251 aa, Artificial sequence
  Synthetic polypeptide
  misc_feature: IgG1FcDELTA16_H, amino acid
HVFLFPPKPKDTLMISRTPEVTCVVVDVSHEDPEVKFNWYVDGVEVHNAKTKPREEQYNSTYRVVSVLTVLHQDWLNGKEYKCKVSNKALPAPIEKTISKAKGQPREPQVYTLPPSRDELTKNQVSLTCLVKGFYPSDIAVEWESNGQPENNYKTTPPVLDSDGSFFLYSKLTVDKSRWQQGNVFSCSVMHEALHNHYTQKSLSLSPEGCPTNGPKIPSIATGMVGALLLLLVVALGIGLFMRRRHIVRKR

SEQ ID NO: 24 - protein, 251 aa, Artificial sequence
  Synthetic polypeptide
  misc_feature: IgG1FcDELTA16_Q, amino acid
QVFLFPPKPKDTLMISRTPEVTCVVVDVSHEDPEVKFNWYVDGVEVHNAKTKPREEQYNSTYRVVSVLTVLHQDWLNGKEYKCKVSNKALPAPIEKTISKAKGQPREPQVYTLPPSRDELTKNQVSLTCLVKGFYPSDIAVEWESNGQPENNYKTTPPVLDSDGSFFLYSKLTVDKSRWQQGNVFSCSVMHEALHNHYTQKSLSLSPEGCPTNGPKIPSIATGMVGALLLLLVVALGIGLFMRRRHIVRKR

SEQ ID NO: 25 - protein, 251 aa, Artificial sequence
  Synthetic polypeptide
  misc_feature: IgG1FcDELTA16_I, amino acid
IVFLFPPKPKDTLMISRTPEVTCVVVDVSHEDPEVKFNWYVDGVEVHNAKTKPREEQYNSTYRVVSVLTVLHQDWLNGKEYKCKVSNKALPAPIEKTISKAKGQPREPQVYTLPPSRDELTKNQVSLTCLVKGFYPSDIAVEWESNGQPENNYKTTPPVLDSDGSFFLYSKLTVDKSRWQQGNVFSCSVMHEALHNHYTQKSLSLSPEGCPTNGPKIPSIATGMVGALLLLLVVALGIGLFMRRRHIVRKR

SEQ ID NO: 26 - protein, 251 aa, Artificial sequence
  Synthetic polypeptide
  misc_feature: IgG1FcDELTA16_M, amino acid
MVFLFPPKPKDTLMISRTPEVTCVVVDVSHEDPEVKFNWYVDGVEVHNAKTKPREEQYNSTYRVVSVLTVLHQDWLNGKEYKCKVSNKALPAPIEKTISKAKGQPREPQVYTLPPSRDELTKNQVSLTCLVKGFYPSDIAVEWESNGQPENNYKTTPPVLDSDGSFFLYSKLTVDKSRWQQGNVFSCSVMHEALHNHYTQKSLSLSPEGCPTNGPKIPSIATGMVGALLLLLVVALGIGLFMRRRHIVRKR

SEQ ID NO: 27 - protein, 251 aa, Artificial sequence
  Synthetic polypeptide
  misc_feature: IgG1FcDELTA16_N, amino acid
NVFLFPPKPKDTLMISRTPEVTCVVVDVSHEDPEVKFNWYVDGVEVHNAKTKPREEQYNSTYRVVSVLTVLHQDWLNGKEYKCKVSNKALPAPIEKTISKAKGQPREPQVYTLPPSRDELTKNQVSLTCLVKGFYPSDIAVEWESNGQPENNYKTTPPVLDSDGSFFLYSKLTVDKSRWQQGNVFSCSVMHEALHNHYTQKSLSLSPEGCPTNGPKIPSIATGMVGALLLLLVVALGIGLFMRRRHIVRKR

SEQ ID NO: 28 - protein, 251 aa, Artificial sequence
  Synthetic polypeptide
  misc_feature: IgG1FcDELTA16_K, amino acid
KVFLFPPKPKDTLMISRTPEVTCVVVDVSHEDPEVKFNWYVDGVEVHNAKTKPREEQYNSTYRVVSVLTVLHQDWLNGKEYKCKVSNKALPAPIEKTISKAKGQPREPQVYTLPPSRDELTKNQVSLTCLVKGFYPSDIAVEWESNGQPENNYKTTPPVLDSDGSFFLYSKLTVDKSRWQQGNVFSCSVMHEALHNHYTQKSLSLSPEGCPTNGPKIPSIATGMVGALLLLLVVALGIGLFMRRRHIVRKR

SEQ ID NO: 29 - protein, 251 aa, Artificial sequence
  Synthetic polypeptide
  misc_feature: IgG1FcDELTA16_V, amino acid
VVFLFPPKPKDTLMISRTPEVTCVVVDVSHEDPEVKFNWYVDGVEVHNAKTKPREEQYNSTYRVVSVLTVLHQDWLNGKEYKCKVSNKALPAPIEKTISKAKGQPREPQVYTLPPSRDELTKNQVSLTCLVKGFYPSDIAVEWESNGQPENNYKTTPPVLDSDGSFFLYSKLTVDKSRWQQGNVFSCSVMHEALHNHYTQKSLSLSPEGCPTNGPKIPSIATGMVGALLLLLVVALGIGLFMRRRHIVRKR

SEQ ID NO: 30 - protein, 251 aa, Artificial sequence
  Synthetic polypeptide
  misc_feature: IgG1FcDELTA16_E, amino acid
EVFLFPPKPKDTLMISRTPEVTCVVVDVSHEDPEVKFNWYVDGVEVHNAKTKPREEQYNSTYRVVSVLTVLHQDWLNGKEYKCKVSNKALPAPIEKTISKAKGQPREPQVYTLPPSRDELTKNQVSLTCLVKGFYPSDIAVEWESNGQPENNYKTTPPVLDSDGSFFLYSKLTVDKSRWQQGNVFSCSVMHEALHNHYTQKSLSLSPEGCPTNGPKIPSIATGMVGALLLLLVVALGIGLFMRRRHIVRKR

SEQ ID NO: 31 - protein, 251 aa, Artificial sequence
  Synthetic polypeptide
  misc_feature: IgG1FcDELTA16_D, amino acid
DVFLFPPKPKDTLMISRTPEVTCVVVDVSHEDPEVKFNWYVDGVEVHNAKTKPREEQYNSTYRVVSVLTVLHQDWLNGKEYKCKVSNKALPAPIEKTISKAKGQPREPQVYTLPPSRDELTKNQVSLTCLVKGFYPSDIAVEWESNGQPENNYKTTPPVLDSDGSFFLYSKLTVDKSRWQQGNVFSCSVMHEALHNHYTQKSLSLSPEGCPTNGPKIPSIATGMVGALLLLLVVALGIGLFMRRRHIVRKR

SEQ ID NO: 32 - protein, 251 aa, Artificial sequence
  Synthetic polypeptide
  misc_feature: IgG1FcDELTA16_C, amino acid
CVFLFPPKPKDTLMISRTPEVTCVVVDVSHEDPEVKFNWYVDGVEVHNAKTKPREEQYNSTYRVVSVLTVLHQDWLNGKEYKCKVSNKALPAPIEKTISKAKGQPREPQVYTLPPSRDELTKNQVSLTCLVKGFYPSDIAVEWESNGQPENNYKTTPPVLDSDGSFFLYSKLTVDKSRWQQGNVFSCSVMHEALHNHYTQKSLSLSPEGCPTNGPKIPSIATGMVGALLLLLVVALGIGLFMRRRHIVRKR

SEQ ID NO: 33 - protein, 251 aa, Artificial sequence
  Synthetic polypeptide
  misc_feature: IgG1FcDELTA16_W, amino acid
WVFLFPPKPKDTLMISRTPEVTCVVVDVSHEDPEVKFNWYVDGVEVHNAKTKPREEQYNSTYRVVSVLTVLHQDWLNGKEYKCKVSNKALPAPIEKTISKAKGQPREPQVYTLPPSRDELTKNQVSLTCLVKGFYPSDIAVEWESNGQPENNYKTTPPVLDSDGSFFLYSKLTVDKSRWQQGNVFSCSVMHEALHNHYTQKSLSLSPEGCPTNGPKIPSIATGMVGALLLLLVVALGIGLFMRRRHIVRKR

SEQ ID NO: 34 - protein, 251 aa, Artificial sequence
  Synthetic polypeptide
  misc_feature: IgG1FcDELTA16_P, amino acid
PVFLFPPKPKDTLMISRTPEVTCVVVDVSHEDPEVKFNWYVDGVEVHNAKTKPREEQYNSTYRVVSVLTVLHQDWLNGKEYKCKVSNKALPAPIEKTISKAKGQPREPQVYTLPPSRDELTKNQVSLTCLVKGFYPSDIAVEWESNGQPENNYKTTPPVLDSDGSFFLYSKLTVDKSRWQQGNVFSCSVMHEALHNHYTQKSLSLSPEGCPTNGPKIPSIATGMVGALLLLLVVALGIGLFMRRRHIVRKR

SEQ ID NO: 35 - protein, 251 aa, Artificial sequence
  Synthetic polypeptide
  misc_feature: IgG1FcDELTA16_R, amino acid
RVFLFPPKPKDTLMISRTPEVTCVVVDVSHEDPEVKFNWYVDGVEVHNAKTKPREEQYNSTYRVVSVLTVLHQDWLNGKEYKCKVSNKALPAPIEKTISKAKGQPREPQVYTLPPSRDELTKNQVSLTCLVKGFYPSDIAVEWESNGQPENNYKTTPPVLDSDGSFFLYSKLTVDKSRWQQGNVFSCSVMHEALHNHYTQKSLSLSPEGCPTNGPKIPSIATGMVGALLLLLVVALGIGLFMRRRHIVRKR

SEQ ID NO: 36 - protein, 251 aa, Artificial sequence
  Synthetic polypeptide
  misc_feature: IgG1FcDELTA16_T, amino acid
TVFLFPPKPKDTLMISRTPEVTCVVVDVSHEDPEVKFNWYVDGVEVHNAKTKPREEQYNSTYRVVSVLTVLHQDWLNGKEYKCKVSNKALPAPIEKTISKAKGQPREPQVYTLPPSRDELTKNQVSLTCLVKGFYPSDIAVEWESNGQPENNYKTTPPVLDSDGSFFLYSKLTVDKSRWQQGNVFSCSVMHEALHNHYTQKSLSLSPEGCPTNGPKIPSIATGMVGALLLLLVVALGIGLFMRRRHIVRKR

SEQ ID NO: 37 - protein, 251 aa, Artificial sequence
  Synthetic polypeptide
  misc_feature: IgG1FcDELTA16_A, amino acid
AVFLFPPKPKDTLMISRTPEVTCVVVDVSHEDPEVKFNWYVDGVEVHNAKTKPREEQYNSTYRVVSVLTVLHQDWLNGKEYKCKVSNKALPAPIEKTISKAKGQPREPQVYTLPPSRDELTKNQVSLTCLVKGFYPSDIAVEWESNGQPENNYKTTPPVLDSDGSFFLYSKLTVDKSRWQQGNVFSCSVMHEALHNHYTQKSLSLSPEGCPTNGPKIPSIATGMVGALLLLLVVALGIGLFMRRRHIVRKR

SEQ ID NO: 38 - protein, 251 aa, Artificial sequence
  Synthetic polypeptide
  misc_feature: IgG1FcDELTA16_G, amino acid
GVFLFPPKPKDTLMISRTPEVTCVVVDVSHEDPEVKFNWYVDGVEVHNAKTKPREEQYNSTYRVVSVLTVLHQDWLNGKEYKCKVSNKALPAPIEKTISKAKGQPREPQVYTLPPSRDELTKNQVSLTCLVKGFYPSDIAVEWESNGQPENNYKTTPPVLDSDGSFFLYSKLTVDKSRWQQGNVFSCSVMHEALHNHYTQKSLSLSPEGCPTNGPKIPSIATGMVGALLLLLVVALGIGLFMRRRHIVRKR

SEQ ID NO: 39 - protein, 252 aa, Artificial sequence
  Synthetic polypeptide
  misc_feature: IgG1FcDELTA16_SS, amino acid
SSVFLFPPKPKDTLMISRTPEVTCVVVDVSHEDPEVKFNWYVDGVEVHNAKTKPREEQYNSTYRVVSVLTVLHQDWLNGKEYKCKVSNKALPAPIEKTISKAKGQPREPQVYTLPPSRDELTKNQVSLTCLVKGFYPSDIAVEWESNGQPENNYKTTPPVLDSDGSFFLYSKLTVDKSRWQQGNVFSCSVMHEALHNHYTQKSLSLSPEGCPTNGPKIPSIATGMVGALLLLLVVALGIGLFMRRRHIVRKR

SEQ ID NO: 40 - protein, 252 aa, Artificial sequence
  Synthetic polypeptide
  misc_feature: IgG1FcDELTA16_FS, amino acid
FSVFLFPPKPKDTLMISRTPEVTCVVVDVSHEDPEVKFNWYVDGVEVHNAKTKPREEQYNSTYRVVSVLTVLHQDWLNGKEYKCKVSNKALPAPIEKTISKAKGQPREPQVYTLPPSRDELTKNQVSLTCLVKGFYPSDIAVEWESNGQPENNYKTTPPVLDSDGSFFLYSKLTVDKSRWQQGNVFSCSVMHEALHNHYTQKSLSLSPEGCPTNGPKIPSIATGMVGALLLLLVVALGIGLFMRRRHIVRKR

SEQ ID NO: 41 - protein, 252 aa, Artificial sequence
  Synthetic polypeptide
  misc_feature: IgG1FcDELTA16_YS, amino acid
YSVFLFPPKPKDTLMISRTPEVTCVVVDVSHEDPEVKFNWYVDGVEVHNAKTKPREEQYNSTYRVVSVLTVLHQDWLNGKEYKCKVSNKALPAPIEKTISKAKGQPREPQVYTLPPSRDELTKNQVSLTCLVKGFYPSDIAVEWESNGQPENNYKTTPPVLDSDGSFFLYSKLTVDKSRWQQGNVFSCSVMHEALHNHYTQKSLSLSPEGCPTNGPKIPSIATGMVGALLLLLVVALGIGLFMRRRHIVRKR

SEQ ID NO: 42 - protein, 252 aa, Artificial sequence
  Synthetic polypeptide
  misc_feature: IgG1FcDELTA16_LS, amino acid
LSVFLFPPKPKDTLMISRTPEVTCVVVDVSHEDPEVKFNWYVDGVEVHNAKTKPREEQYNSTYRVVSVLTVLHQDWLNGKEYKCKVSNKALPAPIEKTISKAKGQPREPQVYTLPPSRDELTKNQVSLTCLVKGFYPSDIAVEWESNGQPENNYKTTPPVLDSDGSFFLYSKLTVDKSRWQQGNVFSCSVMHEALHNHYTQKSLSLSPEGCPTNGPKIPSIATGMVGALLLLLVVALGIGLFMRRRHIVRKR

SEQ ID NO: 43 - protein, 252 aa, Artificial sequence
  Synthetic polypeptide
  misc_feature: IgG1FcDELTA16_HS, amino acid
HSVFLFPPKPKDTLMISRTPEVTCVVVDVSHEDPEVKFNWYVDGVEVHNAKTKPREEQYNSTYRVVSVLTVLHQDWLNGKEYKCKVSNKALPAPIEKTISKAKGQPREPQVYTLPPSRDELTKNQVSLTCLVKGFYPSDIAVEWESNGQPENNYKTTPPVLDSDGSFFLYSKLTVDKSRWQQGNVFSCSVMHEALHNHYTQKSLSLSPEGCPTNGPKIPSIATGMVGALLLLLVVALGIGLFMRRRHIVRKR

SEQ ID NO: 44 - protein, 252 aa, Artificial sequence
  Synthetic polypeptide
  misc_feature: IgG1FcDELTA16_QS, amino acid
QSVFLFPPKPKDTLMISRTPEVTCVVVDVSHEDPEVKFNWYVDGVEVHNAKTKPREEQYNSTYRVVSVLTVLHQDWLNGKEYKCKVSNKALPAPIEKTISKAKGQPREPQVYTLPPSRDELTKNQVSLTCLVKGFYPSDIAVEWESNGQPENNYKTTPPVLDSDGSFFLYSKLTVDKSRWQQGNVFSCSVMHEALHNHYTQKSLSLSPEGCPTNGPKIPSIATGMVGALLLLLVVALGIGLFMRRRHIVRKR

SEQ ID NO: 45 - protein, 252 aa, Artificial sequence
  Synthetic polypeptide
  misc_feature: IgG1FcDELTA16_IS, amino acid
ISVFLFPPKPKDTLMISRTPEVTCVVVDVSHEDPEVKFNWYVDGVEVHNAKTKPREEQYNSTYRVVSVLTVLHQDWLNGKEYKCKVSNKALPAPIEKTISKAKGQPREPQVYTLPPSRDELTKNQVSLTCLVKGFYPSDIAVEWESNGQPENNYKTTPPVLDSDGSFFLYSKLTVDKSRWQQGNVFSCSVMHEALHNHYTQKSLSLSPEGCPTNGPKIPSIATGMVGALLLLLVVALGIGLFMRRRHIVRKR

SEQ ID NO: 46 - protein, 252 aa, Artificial sequence
  Synthetic polypeptide
  misc_feature: IgG1FcDELTA16_MS, amino acid
MSVFLFPPKPKDTLMISRTPEVTCVVVDVSHEDPEVKFNWYVDGVEVHNAKTKPREEQYNSTYRVVSVLTVLHQDWLNGKEYKCKVSNKALPAPIEKTISKAKGQPREPQVYTLPPSRDELTKNQVSLTCLVKGFYPSDIAVEWESNGQPENNYKTTPPVLDSDGSFFLYSKLTVDKSRWQQGNVFSCSVMHEALHNHYTQKSLSLSPEGCPTNGPKIPSIATGMVGALLLLLVVALGIGLFMRRRHIVRKR

SEQ ID NO: 47 - protein, 252 aa, Artificial sequence
  Synthetic polypeptide
  misc_feature: IgG1FcDELTA16_NS, amino acid
NSVFLFPPKPKDTLMISRTPEVTCVVVDVSHEDPEVKFNWYVDGVEVHNAKTKPREEQYNSTYRVVSVLTVLHQDWLNGKEYKCKVSNKALPAPIEKTISKAKGQPREPQVYTLPPSRDELTKNQVSLTCLVKGFYPSDIAVEWESNGQPENNYKTTPPVLDSDGSFFLYSKLTVDKSRWQQGNVFSCSVMHEALHNHYTQKSLSLSPEGCPTNGPKIPSIATGMVGALLLLLVVALGIGLFMRRRHIVRKR

SEQ ID NO: 48 - protein, 252 aa, Artificial sequence
  Synthetic polypeptide
  misc_feature: IgG1FcDELTA16_KS, amino acid
KSVFLFPPKPKDTLMISRTPEVTCVVVDVSHEDPEVKFNWYVDGVEVHNAKTKPREEQYNSTYRVVSVLTVLHQDWLNGKEYKCKVSNKALPAPIEKTISKAKGQPREPQVYTLPPSRDELTKNQVSLTCLVKGFYPSDIAVEWESNGQPENNYKTTPPVLDSDGSFFLYSKLTVDKSRWQQGNVFSCSVMHEALHNHYTQKSLSLSPEGCPTNGPKIPSIATGMVGALLLLLVVALGIGLFMRRRHIVRKR

SEQ ID NO: 49 - protein, 252 aa, Artificial sequence
  Synthetic polypeptide
  misc_feature: IgG1FcDELTA16_VS, amino acid
VSVFLFPPKPKDTLMISRTPEVTCVVVDVSHEDPEVKFNWYVDGVEVHNAKTKPREEQYNSTYRVVSVLTVLHQDWLNGKEYKCKVSNKALPAPIEKTISKAKGQPREPQVYTLPPSRDELTKNQVSLTCLVKGFYPSDIAVEWESNGQPENNYKTTPPVLDSDGSFFLYSKLTVDKSRWQQGNVFSCSVMHEALHNHYTQKSLSLSPEGCPTNGPKIPSIATGMVGALLLLLVVALGIGLFMRRRHIVRKR

SEQ ID NO: 50 - protein, 252 aa, Artificial sequence
  Synthetic polypeptide
  misc_feature: IgG1FcDELTA16_ES, amino acid
ESVFLFPPKPKDTLMISRTPEVTCVVVDVSHEDPEVKFNWYVDGVEVHNAKTKPREEQYNSTYRVVSVLTVLHQDWLNGKEYKCKVSNKALPAPIEKTISKAKGQPREPQVYTLPPSRDELTKNQVSLTCLVKGFYPSDIAVEWESNGQPENNYKTTPPVLDSDGSFFLYSKLTVDKSRWQQGNVFSCSVMHEALHNHYTQKSLSLSPEGCPTNGPKIPSIATGMVGALLLLLVVALGIGLFMRRRHIVRKR

SEQ ID NO: 51 - protein, 252 aa, Artificial sequence
  Synthetic polypeptide
  misc_feature: IgG1FcDELTA16_DS, amino acid
DSVFLFPPKPKDTLMISRTPEVTCVVVDVSHEDPEVKFNWYVDGVEVHNAKTKPREEQYNSTYRVVSVLTVLHQDWLNGKEYKCKVSNKALPAPIEKTISKAKGQPREPQVYTLPPSRDELTKNQVSLTCLVKGFYPSDIAVEWESNGQPENNYKTTPPVLDSDGSFFLYSKLTVDKSRWQQGNVFSCSVMHEALHNHYTQKSLSLSPEGCPTNGPKIPSIATGMVGALLLLLVVALGIGLFMRRRHIVRKR

SEQ ID NO: 52 - protein, 252 aa, Artificial sequence
  Synthetic polypeptide
  misc_feature: IgG1FcDELTA16_CS, amino acid
CSVFLFPPKPKDTLMISRTPEVTCVVVDVSHEDPEVKFNWYVDGVEVHNAKTKPREEQYNSTYRVVSVLTVLHQDWLNGKEYKCKVSNKALPAPIEKTISKAKGQPREPQVYTLPPSRDELTKNQVSLTCLVKGFYPSDIAVEWESNGQPENNYKTTPPVLDSDGSFFLYSKLTVDKSRWQQGNVFSCSVMHEALHNHYTQKSLSLSPEGCPTNGPKIPSIATGMVGALLLLLVVALGIGLFMRRRHIVRKR

SEQ ID NO: 53 - protein, 252 aa, Artificial sequence
  Synthetic polypeptide
  misc_feature: IgG1FcDELTA16_WS, amino acid
WSVFLFPPKPKDTLMISRTPEVTCVVVDVSHEDPEVKFNWYVDGVEVHNAKTKPREEQYNSTYRVVSVLTVLHQDWLNGKEYKCKVSNKALPAPIEKTISKAKGQPREPQVYTLPPSRDELTKNQVSLTCLVKGFYPSDIAVEWESNGQPENNYKTTPPVLDSDGSFFLYSKLTVDKSRWQQGNVFSCSVMHEALHNHYTQKSLSLSPEGCPTNGPKIPSIATGMVGALLLLLVVALGIGLFMRRRHIVRKR

SEQ ID NO: 54 - protein, 252 aa, Artificial sequence
  Synthetic polypeptide
  misc_feature: IgG1FcDELTA16_PS, amino acid
PSVFLFPPKPKDTLMISRTPEVTCVVVDVSHEDPEVKFNWYVDGVEVHNAKTKPREEQYNSTYRVVSVLTVLHQDWLNGKEYKCKVSNKALPAPIEKTISKAKGQPREPQVYTLPPSRDELTKNQVSLTCLVKGFYPSDIAVEWESNGQPENNYKTTPPVLDSDGSFFLYSKLTVDKSRWQQGNVFSCSVMHEALHNHYTQKSLSLSPEGCPTNGPKIPSIATGMVGALLLLLVVALGIGLFMRRRHIVRKR

SEQ ID NO: 55 - protein, 252 aa, Artificial sequence
  Synthetic polypeptide
  misc_feature: IgG1FcDELTA16_RS, amino acid
RSVFLFPPKPKDTLMISRTPEVTCVVVDVSHEDPEVKFNWYVDGVEVHNAKTKPREEQYNSTYRVVSVLTVLHQDWLNGKEYKCKVSNKALPAPIEKTISKAKGQPREPQVYTLPPSRDELTKNQVSLTCLVKGFYPSDIAVEWESNGQPENNYKTTPPVLDSDGSFFLYSKLTVDKSRWQQGNVFSCSVMHEALHNHYTQKSLSLSPEGCPTNGPKIPSIATGMVGALLLLLVVALGIGLFMRRRHIVRKR

SEQ ID NO: 56 - protein, 252 aa, Artificial sequence
  Synthetic polypeptide
  misc_feature: IgG1FcDELTA16_TS, amino acid
TSVFLFPPKPKDTLMISRTPEVTCVVVDVSHEDPEVKFNWYVDGVEVHNAKTKPREEQYNSTYRVVSVLTVLHQDWLNGKEYKCKVSNKALPAPIEKTISKAKGQPREPQVYTLPPSRDELTKNQVSLTCLVKGFYPSDIAVEWESNGQPENNYKTTPPVLDSDGSFFLYSKLTVDKSRWQQGNVFSCSVMHEALHNHYTQKSLSLSPEGCPTNGPKIPSIATGMVGALLLLLVVALGIGLFMRRRHIVRKR

SEQ ID NO: 57 - protein, 252 aa, Artificial sequence
  Synthetic polypeptide
  misc_feature: IgG1FcDELTA16_AS, amino acid
ASVFLFPPKPKDTLMISRTPEVTCVVVDVSHEDPEVKFNWYVDGVEVHNAKTKPREEQYNSTYRVVSVLTVLHQDWLNGKEYKCKVSNKALPAPIEKTISKAKGQPREPQVYTLPPSRDELTKNQVSLTCLVKGFYPSDIAVEWESNGQPENNYKTTPPVLDSDGSFFLYSKLTVDKSRWQQGNVFSCSVMHEALHNHYTQKSLSLSPEGCPTNGPKIPSIATGMVGALLLLLVVALGIGLFMRRRHIVRKR

SEQ ID NO: 58 - protein, 252 aa, Artificial sequence
  Synthetic polypeptide
  misc_feature: IgG1FcDELTA16_GS, amino acid
GSVFLFPPKPKDTLMISRTPEVTCVVVDVSHEDPEVKFNWYVDGVEVHNAKTKPREEQYNSTYRVVSVLTVLHQDWLNGKEYKCKVSNKALPAPIEKTISKAKGQPREPQVYTLPPSRDELTKNQVSLTCLVKGFYPSDIAVEWESNGQPENNYKTTPPVLDSDGSFFLYSKLTVDKSRWQQGNVFSCSVMHEALHNHYTQKSLSLSPEGCPTNGPKIPSIATGMVGALLLLLVVALGIGLFMRRRHIVRKR

SEQ ID NO: 59 - protein, 257 aa, Artificial sequence
  Synthetic polypeptide
  misc_feature: IgG1FcDELTA16_ELLGGPS
ELLGGPSVFLFPPKPKDTLMISRTPEVTCVVVDVSHEDPEVKFNWYVDGVEVHNAKTKPREEQYNSTYRVVSVLTVLHQDWLNGKEYKCKVSNKALPAPIEKTISKAKGQPREPQVYTLPPSRDELTKNQVSLTCLVKGFYPSDIAVEWESNGQPENNYKTTPPVLDSDGSFFLYSKLTVDKSRWQQGNVFSCSVMHEALHNHYTQKSLSLSPEGCPTNGPKIPSIATGMVGALLLLLVVALGIGLFMRRRHIVRKR

SEQ ID NO: 60 - protein, 256 aa, Artificial sequence
  Synthetic polypeptide
  misc_feature: IgG1FcDELTA16_LLGGPS
LLGGPSVFLFPPKPKDTLMISRTPEVTCVVVDVSHEDPEVKFNWYVDGVEVHNAKTKPREEQYNSTYRVVSVLTVLHQDWLNGKEYKCKVSNKALPAPIEKTISKAKGQPREPQVYTLPPSRDELTKNQVSLTCLVKGFYPSDIAVEWESNGQPENNYKTTPPVLDSDGSFFLYSKLTVDKSRWQQGNVFSCSVMHEALHNHYTQKSLSLSPEGCPTNGPKIPSIATGMVGALLLLLVVALGIGLFMRRRHIVRKR

SEQ ID NO: 61 - protein, 255 aa, Artificial sequence
  Synthetic polypeptide
  misc_feature: IgG1FcDELTA16_LGGPS
LGGPSVFLFPPKPKDTLMISRTPEVTCVVVDVSHEDPEVKFNWYVDGVEVHNAKTKPREEQYNSTYRVVSVLTVLHQDWLNGKEYKCKVSNKALPAPIEKTISKAKGQPREPQVYTLPPSRDELTKNQVSLTCLVKGFYPSDIAVEWESNGQPENNYKTTPPVLDSDGSFFLYSKLTVDKSRWQQGNVFSCSVMHEALHNHYTQKSLSLSPEGCPTNGPKIPSIATGMVGALLLLLVVALGIGLFMRRRHIVRKR

SEQ ID NO: 62 - protein, 254 aa, Artificial sequence
  Synthetic polypeptide
  misc_feature: IgG1FcDELTA16_GGPS
GGPSVFLFPPKPKDTLMISRTPEVTCVVVDVSHEDPEVKFNWYVDGVEVHNAKTKPREEQYNSTYRVVSVLTVLHQDWLNGKEYKCKVSNKALPAPIEKTISKAKGQPREPQVYTLPPSRDELTKNQVSLTCLVKGFYPSDIAVEWESNGQPENNYKTTPPVLDSDGSFFLYSKLTVDKSRWQQGNVFSCSVMHEALHNHYTQKSLSLSPEGCPTNGPKIPSIATGMVGALLLLLVVALGIGLFMRRRHIVRKR

SEQ ID NO: 63 - protein, 253 aa, Artificial sequence
  Synthetic polypeptide
  misc_feature: IgG1FcDELTA16_GPS
GPSVFLFPPKPKDTLMISRTPEVTCVVVDVSHEDPEVKFNWYVDGVEVHNAKTKPREEQYNSTYRVVSVLTVLHQDWLNGKEYKCKVSNKALPAPIEKTISKAKGQPREPQVYTLPPSRDELTKNQVSLTCLVKGFYPSDIAVEWESNGQPENNYKTTPPVLDSDGSFFLYSKLTVDKSRWQQGNVFSCSVMHEALHNHYTQKSLSLSPEGCPTNGPKIPSIATGMVGALLLLLVVALGIGLFMRRRHIVRKR

SEQ ID NO: 64 - protein, 253 aa, Artificial sequence
  Synthetic polypeptide
  misc_feature: IgG1FcDELTA16_SDW
SDWVFLFPPKPKDTLMISRTPEVTCVVVDVSHEDPEVKFNWYVDGVEVHNAKTKPREEQYNSTYRVVSVLTVLHQDWLNGKEYKCKVSNKALPAPIEKTISKAKGQPREPQVYTLPPSRDELTKNQVSLTCLVKGFYPSDIAVEWESNGQPENNYKTTPPVLDSDGSFFLYSKLTVDKSRWQQGNVFSCSVMHEALHNHYTQKSLSLSPEGCPTNGPKIPSIATGMVGALLLLLVVALGIGLFMRRRHIVRKR

SEQ ID NO: 65 - protein, 253 aa, Artificial sequence
  Synthetic polypeptide
  misc_feature: IgG1FcDELTA16_FDW
FDWVFLFPPKPKDTLMISRTPEVTCVVVDVSHEDPEVKFNWYVDGVEVHNAKTKPREEQYNSTYRVVSVLTVLHQDWLNGKEYKCKVSNKALPAPIEKTISKAKGQPREPQVYTLPPSRDELTKNQVSLTCLVKGFYPSDIAVEWESNGQPENNYKTTPPVLDSDGSFFLYSKLTVDKSRWQQGNVFSCSVMHEALHNHYTQKSLSLSPEGCPTNGPKIPSIATGMVGALLLLLVVALGIGLFMRRRHIVRKR

SEQ ID NO: 66 - protein, 253 aa, Artificial sequence
  Synthetic polypeptide
  misc_feature: IgG1FcDELTA16_YDW
YDWVFLFPPKPKDTLMISRTPEVTCVVVDVSHEDPEVKFNWYVDGVEVHNAKTKPREEQYNSTYRVVSVLTVLHQDWLNGKEYKCKVSNKALPAPIEKTISKAKGQPREPQVYTLPPSRDELTKNQVSLTCLVKGFYPSDIAVEWESNGQPENNYKTTPPVLDSDGSFFLYSKLTVDKSRWQQGNVFSCSVMHEALHNHYTQKSLSLSPEGCPTNGPKIPSIATGMVGALLLLLVVALGIGLFMRRRHIVRKR

SEQ ID NO: 67 - protein, 253 aa, Artificial sequence
  Synthetic polypeptide
  misc_feature: IgG1FcDELTA16_LDW
LDWVFLFPPKPKDTLMISRTPEVTCVVVDVSHEDPEVKFNWYVDGVEVHNAKTKPREEQYNSTYRVVSVLTVLHQDWLNGKEYKCKVSNKALPAPIEKTISKAKGQPREPQVYTLPPSRDELTKNQVSLTCLVKGFYPSDIAVEWESNGQPENNYKTTPPVLDSDGSFFLYSKLTVDKSRWQQGNVFSCSVMHEALHNHYTQKSLSLSPEGCPTNGPKIPSIATGMVGALLLLLVVALGIGLFMRRRHIVRKR

SEQ ID NO: 68 - protein, 253 aa, Artificial sequence
  Synthetic polypeptide
  misc_feature: IgG1FcDELTA16_HDW
HDWVFLFPPKPKDTLMISRTPEVTCVVVDVSHEDPEVKFNWYVDGVEVHNAKTKPREEQYNSTYRVVSVLTVLHQDWLNGKEYKCKVSNKALPAPIEKTISKAKGQPREPQVYTLPPSRDELTKNQVSLTCLVKGFYPSDIAVEWESNGQPENNYKTTPPVLDSDGSFFLYSKLTVDKSRWQQGNVFSCSVMHEALHNHYTQKSLSLSPEGCPTNGPKIPSIATGMVGALLLLLVVALGIGLFMRRRHIVRKR

SEQ ID NO: 69 - protein, 253 aa, Artificial sequence
  Synthetic polypeptide
  misc_feature: IgG1FcDELTA16_QDW
QDWVFLFPPKPKDTLMISRTPEVTCVVVDVSHEDPEVKFNWYVDGVEVHNAKTKPREEQYNSTYRVVSVLTVLHQDWLNGKEYKCKVSNKALPAPIEKTISKAKGQPREPQVYTLPPSRDELTKNQVSLTCLVKGFYPSDIAVEWESNGQPENNYKTTPPVLDSDGSFFLYSKLTVDKSRWQQGNVFSCSVMHEALHNHYTQKSLSLSPEGCPTNGPKIPSIATGMVGALLLLLVVALGIGLFMRRRHIVRKR

SEQ ID NO: 70 - protein, 253 aa, Artificial sequence
  Synthetic polypeptide
  misc_feature: IgG1FcDELTA16_IDW
IDWVFLFPPKPKDTLMISRTPEVTCVVVDVSHEDPEVKFNWYVDGVEVHNAKTKPREEQYNSTYRVVSVLTVLHQDWLNGKEYKCKVSNKALPAPIEKTISKAKGQPREPQVYTLPPSRDELTKNQVSLTCLVKGFYPSDIAVEWESNGQPENNYKTTPPVLDSDGSFFLYSKLTVDKSRWQQGNVFSCSVMHEALHNHYTQKSLSLSPEGCPTNGPKIPSIATGMVGALLLLLVVALGIGLFMRRRHIVRKR

SEQ ID NO: 71 - protein, 253 aa, Artificial sequence
  Synthetic polypeptide
  misc_feature: IgG1FcDELTA16_MDW
MDWVFLFPPKPKDTLMISRTPEVTCVVVDVSHEDPEVKFNWYVDGVEVHNAKTKPREEQYNSTYRVVSVLTVLHQDWLNGKEYKCKVSNKALPAPIEKTISKAKGQPREPQVYTLPPSRDELTKNQVSLTCLVKGFYPSDIAVEWESNGQPENNYKTTPPVLDSDGSFFLYSKLTVDKSRWQQGNVFSCSVMHEALHNHYTQKSLSLSPEGCPTNGPKIPSIATGMVGALLLLLVVALGIGLFMRRRHIVRKR

SEQ ID NO: 72 - protein, 253 aa, Artificial sequence
  Synthetic polypeptide
  misc_feature: IgG1FcDELTA16_NDW
NDWVFLFPPKPKDTLMISRTPEVTCVVVDVSHEDPEVKFNWYVDGVEVHNAKTKPREEQYNSTYRVVSVLTVLHQDWLNGKEYKCKVSNKALPAPIEKTISKAKGQPREPQVYTLPPSRDELTKNQVSLTCLVKGFYPSDIAVEWESNGQPENNYKTTPPVLDSDGSFFLYSKLTVDKSRWQQGNVFSCSVMHEALHNHYTQKSLSLSPEGCPTNGPKIPSIATGMVGALLLLLVVALGIGLFMRRRHIVRKR

SEQ ID NO: 73 - protein, 253 aa, Artificial sequence
  Synthetic polypeptide
  misc_feature: IgG1FcDELTA16_KDW
KDWVFLFPPKPKDTLMISRTPEVTCVVVDVSHEDPEVKFNWYVDGVEVHNAKTKPREEQYNSTYRVVSVLTVLHQDWLNGKEYKCKVSNKALPAPIEKTISKAKGQPREPQVYTLPPSRDELTKNQVSLTCLVKGFYPSDIAVEWESNGQPENNYKTTPPVLDSDGSFFLYSKLTVDKSRWQQGNVFSCSVMHEALHNHYTQKSLSLSPEGCPTNGPKIPSIATGMVGALLLLLVVALGIGLFMRRRHIVRKR

SEQ ID NO: 74 - protein, 253 aa, Artificial sequence
  Synthetic polypeptide
  misc_feature: IgG1FcDELTA16_VDW
VDWVFLFPPKPKDTLMISRTPEVTCVVVDVSHEDPEVKFNWYVDGVEVHNAKTKPREEQYNSTYRVVSVLTVLHQDWLNGKEYKCKVSNKALPAPIEKTISKAKGQPREPQVYTLPPSRDELTKNQVSLTCLVKGFYPSDIAVEWESNGQPENNYKTTPPVLDSDGSFFLYSKLTVDKSRWQQGNVFSCSVMHEALHNHYTQKSLSLSPEGCPTNGPKIPSIATGMVGALLLLLVVALGIGLFMRRRHIVRKR

SEQ ID NO: 75 - protein, 253 aa, Artificial sequence
  Synthetic polypeptide
  misc_feature: IgG1FcDELTA16_EDW
EDWVFLFPPKPKDTLMISRTPEVTCVVVDVSHEDPEVKFNWYVDGVEVHNAKTKPREEQYNSTYRVVSVLTVLHQDWLNGKEYKCKVSNKALPAPIEKTISKAKGQPREPQVYTLPPSRDELTKNQVSLTCLVKGFYPSDIAVEWESNGQPENNYKTTPPVLDSDGSFFLYSKLTVDKSRWQQGNVFSCSVMHEALHNHYTQKSLSLSPEGCPTNGPKIPSIATGMVGALLLLLVVALGIGLFMRRRHIVRKR

SEQ ID NO: 76 - protein, 253 aa, Artificial sequence
  Synthetic polypeptide
  misc_feature: IgG1FcDELTA16_DDW
DDWVFLFPPKPKDTLMISRTPEVTCVVVDVSHEDPEVKFNWYVDGVEVHNAKTKPREEQYNSTYRVVSVLTVLHQDWLNGKEYKCKVSNKALPAPIEKTISKAKGQPREPQVYTLPPSRDELTKNQVSLTCLVKGFYPSDIAVEWESNGQPENNYKTTPPVLDSDGSFFLYSKLTVDKSRWQQGNVFSCSVMHEALHNHYTQKSLSLSPEGCPTNGPKIPSIATGMVGALLLLLVVALGIGLFMRRRHIVRKR

SEQ ID NO: 77 - protein, 253 aa, Artificial sequence
  Synthetic polypeptide
  misc_feature: IgG1FcDELTA16_CDW
CDWVFLFPPKPKDTLMISRTPEVTCVVVDVSHEDPEVKFNWYVDGVEVHNAKTKPREEQYNSTYRVVSVLTVLHQDWLNGKEYKCKVSNKALPAPIEKTISKAKGQPREPQVYTLPPSRDELTKNQVSLTCLVKGFYPSDIAVEWESNGQPENNYKTTPPVLDSDGSFFLYSKLTVDKSRWQQGNVFSCSVMHEALHNHYTQKSLSLSPEGCPTNGPKIPSIATGMVGALLLLLVVALGIGLFMRRRHIVRKR

SEQ ID NO: 78 - protein, 253 aa, Artificial sequence
  Synthetic polypeptide
  misc_feature: IgG1FcDELTA16_WDW
WDWVFLFPPKPKDTLMISRTPEVTCVVVDVSHEDPEVKFNWYVDGVEVHNAKTKPREEQYNSTYRVVSVLTVLHQDWLNGKEYKCKVSNKALPAPIEKTISKAKGQPREPQVYTLPPSRDELTKNQVSLTCLVKGFYPSDIAVEWESNGQPENNYKTTPPVLDSDGSFFLYSKLTVDKSRWQQGNVFSCSVMHEALHNHYTQKSLSLSPEGCPTNGPKIPSIATGMVGALLLLLVVALGIGLFMRRRHIVRKR

SEQ ID NO: 79 - protein, 253 aa, Artificial sequence
  Synthetic polypeptide
  misc_feature: IgG1FcDELTA16_PDW
PDWVFLFPPKPKDTLMISRTPEVTCVVVDVSHEDPEVKFNWYVDGVEVHNAKTKPREEQYNSTYRVVSVLTVLHQDWLNGKEYKCKVSNKALPAPIEKTISKAKGQPREPQVYTLPPSRDELTKNQVSLTCLVKGFYPSDIAVEWESNGQPENNYKTTPPVLDSDGSFFLYSKLTVDKSRWQQGNVFSCSVMHEALHNHYTQKSLSLSPEGCPTNGPKIPSIATGMVGALLLLLVVALGIGLFMRRRHIVRKR

SEQ ID NO: 80 - protein, 253 aa, Artificial sequence
  Synthetic polypeptide
  misc_feature: IgG1FcDELTA16_RDW
RDWVFLFPPKPKDTLMISRTPEVTCVVVDVSHEDPEVKFNWYVDGVEVHNAKTKPREEQYNSTYRVVSVLTVLHQDWLNGKEYKCKVSNKALPAPIEKTISKAKGQPREPQVYTLPPSRDELTKNQVSLTCLVKGFYPSDIAVEWESNGQPENNYKTTPPVLDSDGSFFLYSKLTVDKSRWQQGNVFSCSVMHEALHNHYTQKSLSLSPEGCPTNGPKIPSIATGMVGALLLLLVVALGIGLFMRRRHIVRKR

SEQ ID NO: 81 - protein, 253 aa, Artificial sequence
  Synthetic polypeptide
  misc_feature: IgG1FcDELTA16_TDW
TDWVFLFPPKPKDTLMISRTPEVTCVVVDVSHEDPEVKFNWYVDGVEVHNAKTKPREEQYNSTYRVVSVLTVLHQDWLNGKEYKCKVSNKALPAPIEKTISKAKGQPREPQVYTLPPSRDELTKNQVSLTCLVKGFYPSDIAVEWESNGQPENNYKTTPPVLDSDGSFFLYSKLTVDKSRWQQGNVFSCSVMHEALHNHYTQKSLSLSPEGCPTNGPKIPSIATGMVGALLLLLVVALGIGLFMRRRHIVRKR

SEQ ID NO: 82 - protein, 253 aa, Artificial sequence
  Synthetic polypeptide
  misc_feature: IgG1FcDELTA16_ADW
ADWVFLFPPKPKDTLMISRTPEVTCVVVDVSHEDPEVKFNWYVDGVEVHNAKTKPREEQYNSTYRVVSVLTVLHQDWLNGKEYKCKVSNKALPAPIEKTISKAKGQPREPQVYTLPPSRDELTKNQVSLTCLVKGFYPSDIAVEWESNGQPENNYKTTPPVLDSDGSFFLYSKLTVDKSRWQQGNVFSCSVMHEALHNHYTQKSLSLSPEGCPTNGPKIPSIATGMVGALLLLLVVALGIGLFMRRRHIVRKR

SEQ ID NO: 83 - protein, 253 aa, Artificial sequence
  Synthetic polypeptide
  misc_feature: IgG1FcDELTA16_GDW
GDWVFLFPPKPKDTLMISRTPEVTCVVVDVSHEDPEVKFNWYVDGVEVHNAKTKPREEQYNSTYRVVSVLTVLHQDWLNGKEYKCKVSNKALPAPIEKTISKAKGQPREPQVYTLPPSRDELTKNQVSLTCLVKGFYPSDIAVEWESNGQPENNYKTTPPVLDSDGSFFLYSKLTVDKSRWQQGNVFSCSVMHEALHNHYTQKSLSLSPEGCPTNGPKIPSIATGMVGALLLLLVVALGIGLFMRRRHIVRKR

SEQ ID NO: 84 - protein, 255 aa, Artificial sequence
  Synthetic polypeptide
  misc_feature: IgG1FcDELTA16_SCWDW
SCWDWVFLFPPKPKDTLMISRTPEVTCVVVDVSHEDPEVKFNWYVDGVEVHNAKTKPREEQYNSTYRVVSVLTVLHQDWLNGKEYKCKVSNKALPAPIEKTISKAKGQPREPQVYTLPPSRDELTKNQVSLTCLVKGFYPSDIAVEWESNGQPENNYKTTPPVLDSDGSFFLYSKLTVDKSRWQQGNVFSCSVMHEALHNHYTQKSLSLSPEGCPTNGPKIPSIATGMVGALLLLLVVALGIGLFMRRRHIVRKR

SEQ ID NO: 85 - protein, 255 aa, Artificial sequence
  Synthetic polypeptide
  misc_feature: IgG1FcDELTA16_FCWDW
FCWDWVFLFPPKPKDTLMISRTPEVTCVVVDVSHEDPEVKFNWYVDGVEVHNAKTKPREEQYNSTYRVVSVLTVLHQDWLNGKEYKCKVSNKALPAPIEKTISKAKGQPREPQVYTLPPSRDELTKNQVSLTCLVKGFYPSDIAVEWESNGQPENNYKTTPPVLDSDGSFFLYSKLTVDKSRWQQGNVFSCSVMHEALHNHYTQKSLSLSPEGCPTNGPKIPSIATGMVGALLLLLVVALGIGLFMRRRHIVRKR

SEQ ID NO: 86 - protein, 255 aa, Artificial sequence
  Synthetic polypeptide
  misc_feature: IgG1FcDELTA16_YCWDW
YCWDWVFLFPPKPKDTLMISRTPEVTCVVVDVSHEDPEVKFNWYVDGVEVHNAKTKPREEQYNSTYRVVSVLTVLHQDWLNGKEYKCKVSNKALPAPIEKTISKAKGQPREPQVYTLPPSRDELTKNQVSLTCLVKGFYPSDIAVEWESNGQPENNYKTTPPVLDSDGSFFLYSKLTVDKSRWQQGNVFSCSVMHEALHNHYTQKSLSLSPEGCPTNGPKIPSIATGMVGALLLLLVVALGIGLFMRRRHIVRKR

SEQ ID NO: 87 - protein, 255 aa, Artificial sequence
  Synthetic polypeptide
  misc_feature: IgG1FcDELTA16_LCWDW
LCWDWVFLFPPKPKDTLMISRTPEVTCVVVDVSHEDPEVKFNWYVDGVEVHNAKTKPREEQYNSTYRVVSVLTVLHQDWLNGKEYKCKVSNKALPAPIEKTISKAKGQPREPQVYTLPPSRDELTKNQVSLTCLVKGFYPSDIAVEWESNGQPENNYKTTPPVLDSDGSFFLYSKLTVDKSRWQQGNVFSCSVMHEALHNHYTQKSLSLSPEGCPTNGPKIPSIATGMVGALLLLLVVALGIGLFMRRRHIVRKR

SEQ ID NO: 88 - protein, 255 aa, Artificial sequence
  Synthetic polypeptide
  misc_feature: IgG1FcDELTA16_HCWDW
HCWDWVFLFPPKPKDTLMISRTPEVTCVVVDVSHEDPEVKFNWYVDGVEVHNAKTKPREEQYNSTYRVVSVLTVLHQDWLNGKEYKCKVSNKALPAPIEKTISKAKGQPREPQVYTLPPSRDELTKNQVSLTCLVKGFYPSDIAVEWESNGQPENNYKTTPPVLDSDGSFFLYSKLTVDKSRWQQGNVFSCSVMHEALHNHYTQKSLSLSPEGCPTNGPKIPSIATGMVGALLLLLVVALGIGLFMRRRHIVRKR

SEQ ID NO: 89 - protein, 255 aa, Artificial sequence
  Synthetic polypeptide
  misc_feature: IgG1FcDELTA16_QCWDW
QCWDWVFLFPPKPKDTLMISRTPEVTCVVVDVSHEDPEVKFNWYVDGVEVHNAKTKPREEQYNSTYRVVSVLTVLHQDWLNGKEYKCKVSNKALPAPIEKTISKAKGQPREPQVYTLPPSRDELTKNQVSLTCLVKGFYPSDIAVEWESNGQPENNYKTTPPVLDSDGSFFLYSKLTVDKSRWQQGNVFSCSVMHEALHNHYTQKSLSLSPEGCPTNGPKIPSIATGMVGALLLLLVVALGIGLFMRRRHIVRKR

SEQ ID NO: 90 - protein, 255 aa, Artificial sequence
  Synthetic polypeptide
  misc_feature: IgG1FcDELTA16_ICWDW
ICWDWVFLFPPKPKDTLMISRTPEVTCVVVDVSHEDPEVKFNWYVDGVEVHNAKTKPREEQYNSTYRVVSVLTVLHQDWLNGKEYKCKVSNKALPAPIEKTISKAKGQPREPQVYTLPPSRDELTKNQVSLTCLVKGFYPSDIAVEWESNGQPENNYKTTPPVLDSDGSFFLYSKLTVDKSRWQQGNVFSCSVMHEALHNHYTQKSLSLSPEGCPTNGPKIPSIATGMVGALLLLLVVALGIGLFMRRRHIVRKR

SEQ ID NO: 91 - protein, 255 aa, Artificial sequence
  Synthetic polypeptide
  misc_feature: IgG1FcDELTA16_MCWDW
MCWDWVFLFPPKPKDTLMISRTPEVTCVVVDVSHEDPEVKFNWYVDGVEVHNAKTKPREEQYNSTYRVVSVLTVLHQDWLNGKEYKCKVSNKALPAPIEKTISKAKGQPREPQVYTLPPSRDELTKNQVSLTCLVKGFYPSDIAVEWESNGQPENNYKTTPPVLDSDGSFFLYSKLTVDKSRWQQGNVFSCSVMHEALHNHYTQKSLSLSPEGCPTNGPKIPSIATGMVGALLLLLVVALGIGLFMRRRHIVRKR

SEQ ID NO: 92 - protein, 255 aa, Artificial sequence
  Synthetic polypeptide
  misc_feature: IgG1FcDELTA16_NCWDW
NCWDWVFLFPPKPKDTLMISRTPEVTCVVVDVSHEDPEVKFNWYVDGVEVHNAKTKPREEQYNSTYRVVSVLTVLHQDWLNGKEYKCKVSNKALPAPIEKTISKAKGQPREPQVYTLPPSRDELTKNQVSLTCLVKGFYPSDIAVEWESNGQPENNYKTTPPVLDSDGSFFLYSKLTVDKSRWQQGNVFSCSVMHEALHNHYTQKSLSLSPEGCPTNGPKIPSIATGMVGALLLLLVVALGIGLFMRRRHIVRKR

SEQ ID NO: 93 - protein, 255 aa, Artificial sequence
  Synthetic polypeptide
  misc_feature: IgG1FcDELTA16_KCWDW
KCWDWVFLFPPKPKDTLMISRTPEVTCVVVDVSHEDPEVKFNWYVDGVEVHNAKTKPREEQYNSTYRVVSVLTVLHQDWLNGKEYKCKVSNKALPAPIEKTISKAKGQPREPQVYTLPPSRDELTKNQVSLTCLVKGFYPSDIAVEWESNGQPENNYKTTPPVLDSDGSFFLYSKLTVDKSRWQQGNVFSCSVMHEALHNHYTQKSLSLSPEGCPTNGPKIPSIATGMVGALLLLLVVALGIGLFMRRRHIVRKR

SEQ ID NO: 94 - protein, 255 aa, Artificial sequence
  Synthetic polypeptide
  misc_feature: IgG1FcDELTA16_VCWDW
VCWDWVFLFPPKPKDTLMISRTPEVTCVVVDVSHEDPEVKFNWYVDGVEVHNAKTKPREEQYNSTYRVVSVLTVLHQDWLNGKEYKCKVSNKALPAPIEKTISKAKGQPREPQVYTLPPSRDELTKNQVSLTCLVKGFYPSDIAVEWESNGQPENNYKTTPPVLDSDGSFFLYSKLTVDKSRWQQGNVFSCSVMHEALHNHYTQKSLSLSPEGCPTNGPKIPSIATGMVGALLLLLVVALGIGLFMRRRHIVRKR

SEQ ID NO: 95 - protein, 255 aa, Artificial sequence
  Synthetic polypeptide
  misc_feature: IgG1FcDELTA16_ECWDW
ECWDWVFLFPPKPKDTLMISRTPEVTCVVVDVSHEDPEVKFNWYVDGVEVHNAKTKPREEQYNSTYRVVSVLTVLHQDWLNGKEYKCKVSNKALPAPIEKTISKAKGQPREPQVYTLPPSRDELTKNQVSLTCLVKGFYPSDIAVEWESNGQPENNYKTTPPVLDSDGSFFLYSKLTVDKSRWQQGNVFSCSVMHEALHNHYTQKSLSLSPEGCPTNGPKIPSIATGMVGALLLLLVVALGIGLFMRRRHIVRKR

SEQ ID NO: 96 - protein, 255 aa, Artificial sequence
  Synthetic polypeptide
  misc_feature: IgG1FcDELTA16_DCWDW
DCWDWVFLFPPKPKDTLMISRTPEVTCVVVDVSHEDPEVKFNWYVDGVEVHNAKTKPREEQYNSTYRVVSVLTVLHQDWLNGKEYKCKVSNKALPAPIEKTISKAKGQPREPQVYTLPPSRDELTKNQVSLTCLVKGFYPSDIAVEWESNGQPENNYKTTPPVLDSDGSFFLYSKLTVDKSRWQQGNVFSCSVMHEALHNHYTQKSLSLSPEGCPTNGPKIPSIATGMVGALLLLLVVALGIGLFMRRRHIVRKR

SEQ ID NO: 97 - protein, 255 aa, Artificial sequence
  Synthetic polypeptide
  misc_feature: IgG1FcDELTA16_CCWDW
CCWDWVFLFPPKPKDTLMISRTPEVTCVVVDVSHEDPEVKFNWYVDGVEVHNAKTKPREEQYNSTYRVVSVLTVLHQDWLNGKEYKCKVSNKALPAPIEKTISKAKGQPREPQVYTLPPSRDELTKNQVSLTCLVKGFYPSDIAVEWESNGQPENNYKTTPPVLDSDGSFFLYSKLTVDKSRWQQGNVFSCSVMHEALHNHYTQKSLSLSPEGCPTNGPKIPSIATGMVGALLLLLVVALGIGLFMRRRHIVRKR

SEQ ID NO: 98 - protein, 255 aa, Artificial sequence
  Synthetic polypeptide
  misc_feature: IgG1FcDELTA16_WCWDW
WCWDWVFLFPPKPKDTLMISRTPEVTCVVVDVSHEDPEVKFNWYVDGVEVHNAKTKPREEQYNSTYRVVSVLTVLHQDWLNGKEYKCKVSNKALPAPIEKTISKAKGQPREPQVYTLPPSRDELTKNQVSLTCLVKGFYPSDIAVEWESNGQPENNYKTTPPVLDSDGSFFLYSKLTVDKSRWQQGNVFSCSVMHEALHNHYTQKSLSLSPEGCPTNGPKIPSIATGMVGALLLLLVVALGIGLFMRRRHIVRKR

SEQ ID NO: 99 - protein, 255 aa, Artificial sequence
  Synthetic polypeptide
  misc_feature: IgG1FcDELTA16_PCWDW
PCWDWVFLFPPKPKDTLMISRTPEVTCVVVDVSHEDPEVKFNWYVDGVEVHNAKTKPREEQYNSTYRVVSVLTVLHQDWLNGKEYKCKVSNKALPAPIEKTISKAKGQPREPQVYTLPPSRDELTKNQVSLTCLVKGFYPSDIAVEWESNGQPENNYKTTPPVLDSDGSFFLYSKLTVDKSRWQQGNVFSCSVMHEALHNHYTQKSLSLSPEGCPTNGPKIPSIATGMVGALLLLLVVALGIGLFMRRRHIVRKR

SEQ ID NO: 100 - protein, 255 aa, Artificial sequence
  Synthetic polypeptide
  misc_feature: IgG1FcDELTA16_RCWDW
RCWDWVFLFPPKPKDTLMISRTPEVTCVVVDVSHEDPEVKFNWYVDGVEVHNAKTKPREEQYNSTYRVVSVLTVLHQDWLNGKEYKCKVSNKALPAPIEKTISKAKGQPREPQVYTLPPSRDELTKNQVSLTCLVKGFYPSDIAVEWESNGQPENNYKTTPPVLDSDGSFFLYSKLTVDKSRWQQGNVFSCSVMHEALHNHYTQKSLSLSPEGCPTNGPKIPSIATGMVGALLLLLVVALGIGLFMRRRHIVRKR

SEQ ID NO: 101 - protein, 255 aa, Artificial sequence
  Synthetic polypeptide
  misc_feature: IgG1FcDELTA16_TCWDW
TCWDWVFLFPPKPKDTLMISRTPEVTCVVVDVSHEDPEVKFNWYVDGVEVHNAKTKPREEQYNSTYRVVSVLTVLHQDWLNGKEYKCKVSNKALPAPIEKTISKAKGQPREPQVYTLPPSRDELTKNQVSLTCLVKGFYPSDIAVEWESNGQPENNYKTTPPVLDSDGSFFLYSKLTVDKSRWQQGNVFSCSVMHEALHNHYTQKSLSLSPEGCPTNGPKIPSIATGMVGALLLLLVVALGIGLFMRRRHIVRKR

SEQ ID NO: 102 - protein, 255 aa, Artificial sequence
  Synthetic polypeptide
  misc_feature: IgG1FcDELTA16_ACWDW
ACWDWVFLFPPKPKDTLMISRTPEVTCVVVDVSHEDPEVKFNWYVDGVEVHNAKTKPREEQYNSTYRVVSVLTVLHQDWLNGKEYKCKVSNKALPAPIEKTISKAKGQPREPQVYTLPPSRDELTKNQVSLTCLVKGFYPSDIAVEWESNGQPENNYKTTPPVLDSDGSFFLYSKLTVDKSRWQQGNVFSCSVMHEALHNHYTQKSLSLSPEGCPTNGPKIPSIATGMVGALLLLLVVALGIGLFMRRRHIVRKR

SEQ ID NO: 103 - protein, 255 aa, Artificial sequence
  Synthetic polypeptide
  misc_feature: IgG1FcDELTA16_GCWDW
GCWDWVFLFPPKPKDTLMISRTPEVTCVVVDVSHEDPEVKFNWYVDGVEVHNAKTKPREEQYNSTYRVVSVLTVLHQDWLNGKEYKCKVSNKALPAPIEKTISKAKGQPREPQVYTLPPSRDELTKNQVSLTCLVKGFYPSDIAVEWESNGQPENNYKTTPPVLDSDGSFFLYSKLTVDKSRWQQGNVFSCSVMHEALHNHYTQKSLSLSPEGCPTNGPKIPSIATGMVGALLLLLVVALGIGLFMRRRHIVRKR

SEQ ID NO: 104 - protein, 254 aa, Artificial sequence
  Synthetic polypeptide
  misc_feature: IgG1FcDELTA16_CWDW
CWDWVFLFPPKPKDTLMISRTPEVTCVVVDVSHEDPEVKFNWYVDGVEVHNAKTKPREEQYNSTYRVVSVLTVLHQDWLNGKEYKCKVSNKALPAPIEKTISKAKGQPREPQVYTLPPSRDELTKNQVSLTCLVKGFYPSDIAVEWESNGQPENNYKTTPPVLDSDGSFFLYSKLTVDKSRWQQGNVFSCSVMHEALHNHYTQKSLSLSPEGCPTNGPKIPSIATGMVGALLLLLVVALGIGLFMRRRHIVRKR

SEQ ID NO: 105 - protein, 256 aa, Artificial sequence
  Synthetic polypeptide
  misc_feature: IgG1FcDELTA16_ETCWDW
ETCWDWVFLFPPKPKDTLMISRTPEVTCVVVDVSHEDPEVKFNWYVDGVEVHNAKTKPREEQYNSTYRVVSVLTVLHQDWLNGKEYKCKVSNKALPAPIEKTISKAKGQPREPQVYTLPPSRDELTKNQVSLTCLVKGFYPSDIAVEWESNGQPENNYKTTPPVLDSDGSFFLYSKLTVDKSRWQQGNVFSCSVMHEALHNHYTQKSLSLSPEGCPTNGPKIPSIATGMVGALLLLLVVALGIGLFMRRRHIVRKR

SEQ ID NO: 106 - protein, 256 aa, Artificial sequence
  Synthetic polypeptide
  misc_feature: IgG1FcDELTA16_DDCWDW
DDCWDWVFLFPPKPKDTLMISRTPEVTCVVVDVSHEDPEVKFNWYVDGVEVHNAKTKPREEQYNSTYRVVSVLTVLHQDWLNGKEYKCKVSNKALPAPIEKTISKAKGQPREPQVYTLPPSRDELTKNQVSLTCLVKGFYPSDIAVEWESNGQPENNYKTTPPVLDSDGSFFLYSKLTVDKSRWQQGNVFSCSVMHEALHNHYTQKSLSLSPEGCPTNGPKIPSIATGMVGALLLLLVVALGIGLFMRRRHIVRKR

SEQ ID NO: 107 - protein, 256 aa, Artificial sequence
  Synthetic polypeptide
  misc_feature: IgG1FcDELTA16_YDCWDW
YDCWDWVFLFPPKPKDTLMISRTPEVTCVVVDVSHEDPEVKFNWYVDGVEVHNAKTKPREEQYNSTYRVVSVLTVLHQDWLNGKEYKCKVSNKALPAPIEKTISKAKGQPREPQVYTLPPSRDELTKNQVSLTCLVKGFYPSDIAVEWESNGQPENNYKTTPPVLDSDGSFFLYSKLTVDKSRWQQGNVFSCSVMHEALHNHYTQKSLSLSPEGCPTNGPKIPSIATGMVGALLLLLVVALGIGLFMRRRHIVRKR

SEQ ID NO: 108 - protein, 252 aa, Artificial sequence
  Synthetic polypeptide
  misc_feature: IgG1FcDELTA16_SD
SDVFLFPPKPKDTLMISRTPEVTCVVVDVSHEDPEVKFNWYVDGVEVHNAKTKPREEQYNSTYRVVSVLTVLHQDWLNGKEYKCKVSNKALPAPIEKTISKAKGQPREPQVYTLPPSRDELTKNQVSLTCLVKGFYPSDIAVEWESNGQPENNYKTTPPVLDSDGSFFLYSKLTVDKSRWQQGNVFSCSVMHEALHNHYTQKSLSLSPEGCPTNGPKIPSIATGMVGALLLLLVVALGIGLFMRRRHIVRKR

SEQ ID NO: 109 - protein, 252 aa, Artificial sequence
  Synthetic polypeptide
  misc_feature: IgG1FcDELTA16_FD
FDVFLFPPKPKDTLMISRTPEVTCVVVDVSHEDPEVKFNWYVDGVEVHNAKTKPREEQYNSTYRVVSVLTVLHQDWLNGKEYKCKVSNKALPAPIEKTISKAKGQPREPQVYTLPPSRDELTKNQVSLTCLVKGFYPSDIAVEWESNGQPENNYKTTPPVLDSDGSFFLYSKLTVDKSRWQQGNVFSCSVMHEALHNHYTQKSLSLSPEGCPTNGPKIPSIATGMVGALLLLLVVALGIGLFMRRRHIVRKR

SEQ ID NO: 110 - protein, 252 aa, Artificial sequence
  Synthetic polypeptide
  misc_feature: IgG1FcDELTA16_YD
YDVFLFPPKPKDTLMISRTPEVTCVVVDVSHEDPEVKFNWYVDGVEVHNAKTKPREEQYNSTYRVVSVLTVLHQDWLNGKEYKCKVSNKALPAPIEKTISKAKGQPREPQVYTLPPSRDELTKNQVSLTCLVKGFYPSDIAVEWESNGQPENNYKTTPPVLDSDGSFFLYSKLTVDKSRWQQGNVFSCSVMHEALHNHYTQKSLSLSPEGCPTNGPKIPSIATGMVGALLLLLVVALGIGLFMRRRHIVRKR

SEQ ID NO: 111 - protein, 252 aa, Artificial sequence
  Synthetic polypeptide
  misc_feature: IgG1FcDELTA16_LD
LDVFLFPPKPKDTLMISRTPEVTCVVVDVSHEDPEVKFNWYVDGVEVHNAKTKPREEQYNSTYRVVSVLTVLHQDWLNGKEYKCKVSNKALPAPIEKTISKAKGQPREPQVYTLPPSRDELTKNQVSLTCLVKGFYPSDIAVEWESNGQPENNYKTTPPVLDSDGSFFLYSKLTVDKSRWQQGNVFSCSVMHEALHNHYTQKSLSLSPEGCPTNGPKIPSIATGMVGALLLLLVVALGIGLFMRRRHIVRKR

SEQ ID NO: 112 - protein, 252 aa, Artificial sequence
  Synthetic polypeptide
  misc_feature: IgG1FcDELTA16_HD
HDVFLFPPKPKDTLMISRTPEVTCVVVDVSHEDPEVKFNWYVDGVEVHNAKTKPREEQYNSTYRVVSVLTVLHQDWLNGKEYKCKVSNKALPAPIEKTISKAKGQPREPQVYTLPPSRDELTKNQVSLTCLVKGFYPSDIAVEWESNGQPENNYKTTPPVLDSDGSFFLYSKLTVDKSRWQQGNVFSCSVMHEALHNHYTQKSLSLSPEGCPTNGPKIPSIATGMVGALLLLLVVALGIGLFMRRRHIVRKR

SEQ ID NO: 113 - protein, 252 aa, Artificial sequence
  Synthetic polypeptide
  misc_feature: IgG1FcDELTA16_QD
QDVFLFPPKPKDTLMISRTPEVTCVVVDVSHEDPEVKFNWYVDGVEVHNAKTKPREEQYNSTYRVVSVLTVLHQDWLNGKEYKCKVSNKALPAPIEKTISKAKGQPREPQVYTLPPSRDELTKNQVSLTCLVKGFYPSDIAVEWESNGQPENNYKTTPPVLDSDGSFFLYSKLTVDKSRWQQGNVFSCSVMHEALHNHYTQKSLSLSPEGCPTNGPKIPSIATGMVGALLLLLVVALGIGLFMRRRHIVRKR

SEQ ID NO: 114 - protein, 252 aa, Artificial sequence
  Synthetic polypeptide
  misc_feature: IgG1FcDELTA16_ID
IDVFLFPPKPKDTLMISRTPEVTCVVVDVSHEDPEVKFNWYVDGVEVHNAKTKPREEQYNSTYRVVSVLTVLHQDWLNGKEYKCKVSNKALPAPIEKTISKAKGQPREPQVYTLPPSRDELTKNQVSLTCLVKGFYPSDIAVEWESNGQPENNYKTTPPVLDSDGSFFLYSKLTVDKSRWQQGNVFSCSVMHEALHNHYTQKSLSLSPEGCPTNGPKIPSIATGMVGALLLLLVVALGIGLFMRRRHIVRKR

SEQ ID NO: 115 - protein, 252 aa, Artificial sequence
  Synthetic polypeptide
  misc_feature: IgG1FcDELTA16_MD
MDVFLFPPKPKDTLMISRTPEVTCVVVDVSHEDPEVKFNWYVDGVEVHNAKTKPREEQYNSTYRVVSVLTVLHQDWLNGKEYKCKVSNKALPAPIEKTISKAKGQPREPQVYTLPPSRDELTKNQVSLTCLVKGFYPSDIAVEWESNGQPENNYKTTPPVLDSDGSFFLYSKLTVDKSRWQQGNVFSCSVMHEALHNHYTQKSLSLSPEGCPTNGPKIPSIATGMVGALLLLLVVALGIGLFMRRRHIVRKR

SEQ ID NO: 116 - protein, 252 aa, Artificial sequence
  Synthetic polypeptide
  misc_feature: IgG1FcDELTA16_ND
NDVFLFPPKPKDTLMISRTPEVTCVVVDVSHEDPEVKFNWYVDGVEVHNAKTKPREEQYNSTYRVVSVLTVLHQDWLNGKEYKCKVSNKALPAPIEKTISKAKGQPREPQVYTLPPSRDELTKNQVSLTCLVKGFYPSDIAVEWESNGQPENNYKTTPPVLDSDGSFFLYSKLTVDKSRWQQGNVFSCSVMHEALHNHYTQKSLSLSPEGCPTNGPKIPSIATGMVGALLLLLVVALGIGLFMRRRHIVRKR

SEQ ID NO: 117 - protein, 252 aa, Artificial sequence
  Synthetic polypeptide
  misc_feature: IgG1FcDELTA16_KD
KDVFLFPPKPKDTLMISRTPEVTCVVVDVSHEDPEVKFNWYVDGVEVHNAKTKPREEQYNSTYRVVSVLTVLHQDWLNGKEYKCKVSNKALPAPIEKTISKAKGQPREPQVYTLPPSRDELTKNQVSLTCLVKGFYPSDIAVEWESNGQPENNYKTTPPVLDSDGSFFLYSKLTVDKSRWQQGNVFSCSVMHEALHNHYTQKSLSLSPEGCPTNGPKIPSIATGMVGALLLLLVVALGIGLFMRRRHIVRKR

SEQ ID NO: 118 - protein, 252 aa, Artificial sequence
  Synthetic polypeptide
  misc_feature: IgG1FcDELTA16_VD
VDVFLFPPKPKDTLMISRTPEVTCVVVDVSHEDPEVKFNWYVDGVEVHNAKTKPREEQYNSTYRVVSVLTVLHQDWLNGKEYKCKVSNKALPAPIEKTISKAKGQPREPQVYTLPPSRDELTKNQVSLTCLVKGFYPSDIAVEWESNGQPENNYKTTPPVLDSDGSFFLYSKLTVDKSRWQQGNVFSCSVMHEALHNHYTQKSLSLSPEGCPTNGPKIPSIATGMVGALLLLLVVALGIGLFMRRRHIVRKR

SEQ ID NO: 119 - protein, 252 aa, Artificial sequence
  Synthetic polypeptide
  misc_feature: IgG1FcDELTA16_ED
EDVFLFPPKPKDTLMISRTPEVTCVVVDVSHEDPEVKFNWYVDGVEVHNAKTKPREEQYNSTYRVVSVLTVLHQDWLNGKEYKCKVSNKALPAPIEKTISKAKGQPREPQVYTLPPSRDELTKNQVSLTCLVKGFYPSDIAVEWESNGQPENNYKTTPPVLDSDGSFFLYSKLTVDKSRWQQGNVFSCSVMHEALHNHYTQKSLSLSPEGCPTNGPKIPSIATGMVGALLLLLVVALGIGLFMRRRHIVRKR

SEQ ID NO: 120 - protein, 252 aa, Artificial sequence
  Synthetic polypeptide
  misc_feature: IgG1FcDELTA16_DD
DDVFLFPPKPKDTLMISRTPEVTCVVVDVSHEDPEVKFNWYVDGVEVHNAKTKPREEQYNSTYRVVSVLTVLHQDWLNGKEYKCKVSNKALPAPIEKTISKAKGQPREPQVYTLPPSRDELTKNQVSLTCLVKGFYPSDIAVEWESNGQPENNYKTTPPVLDSDGSFFLYSKLTVDKSRWQQGNVFSCSVMHEALHNHYTQKSLSLSPEGCPTNGPKIPSIATGMVGALLLLLVVALGIGLFMRRRHIVRKR

SEQ ID NO: 121 - protein, 252 aa, Artificial sequence
  Synthetic polypeptide
  misc_feature: IgG1FcDELTA16_CD
CDVFLFPPKPKDTLMISRTPEVTCVVVDVSHEDPEVKFNWYVDGVEVHNAKTKPREEQYNSTYRVVSVLTVLHQDWLNGKEYKCKVSNKALPAPIEKTISKAKGQPREPQVYTLPPSRDELTKNQVSLTCLVKGFYPSDIAVEWESNGQPENNYKTTPPVLDSDGSFFLYSKLTVDKSRWQQGNVFSCSVMHEALHNHYTQKSLSLSPEGCPTNGPKIPSIATGMVGALLLLLVVALGIGLFMRRRHIVRKR

SEQ ID NO: 122 - protein, 252 aa, Artificial sequence
  Synthetic polypeptide
  misc_feature: IgG1FcDELTA16_WD
WDVFLFPPKPKDTLMISRTPEVTCVVVDVSHEDPEVKFNWYVDGVEVHNAKTKPREEQYNSTYRVVSVLTVLHQDWLNGKEYKCKVSNKALPAPIEKTISKAKGQPREPQVYTLPPSRDELTKNQVSLTCLVKGFYPSDIAVEWESNGQPENNYKTTPPVLDSDGSFFLYSKLTVDKSRWQQGNVFSCSVMHEALHNHYTQKSLSLSPEGCPTNGPKIPSIATGMVGALLLLLVVALGIGLFMRRRHIVRKR

SEQ ID NO: 123 - protein, 252 aa, Artificial sequence
  Synthetic polypeptide
  misc_feature: IgG1FcDELTA16_PD
PDVFLFPPKPKDTLMISRTPEVTCVVVDVSHEDPEVKFNWYVDGVEVHNAKTKPREEQYNSTYRVVSVLTVLHQDWLNGKEYKCKVSNKALPAPIEKTISKAKGQPREPQVYTLPPSRDELTKNQVSLTCLVKGFYPSDIAVEWESNGQPENNYKTTPPVLDSDGSFFLYSKLTVDKSRWQQGNVFSCSVMHEALHNHYTQKSLSLSPEGCPTNGPKIPSIATGMVGALLLLLVVALGIGLFMRRRHIVRKR

SEQ ID NO: 124 - protein, 252 aa, Artificial sequence
  Synthetic polypeptide
  misc_feature: IgG1FcDELTA16_RD
RDVFLFPPKPKDTLMISRTPEVTCVVVDVSHEDPEVKFNWYVDGVEVHNAKTKPREEQYNSTYRVVSVLTVLHQDWLNGKEYKCKVSNKALPAPIEKTISKAKGQPREPQVYTLPPSRDELTKNQVSLTCLVKGFYPSDIAVEWESNGQPENNYKTTPPVLDSDGSFFLYSKLTVDKSRWQQGNVFSCSVMHEALHNHYTQKSLSLSPEGCPTNGPKIPSIATGMVGALLLLLVVALGIGLFMRRRHIVRKR

SEQ ID NO: 125 - protein, 252 aa, Artificial sequence
  Synthetic polypeptide
  misc_feature: IgG1FcDELTA16_TD
TDVFLFPPKPKDTLMISRTPEVTCVVVDVSHEDPEVKFNWYVDGVEVHNAKTKPREEQYNSTYRVVSVLTVLHQDWLNGKEYKCKVSNKALPAPIEKTISKAKGQPREPQVYTLPPSRDELTKNQVSLTCLVKGFYPSDIAVEWESNGQPENNYKTTPPVLDSDGSFFLYSKLTVDKSRWQQGNVFSCSVMHEALHNHYTQKSLSLSPEGCPTNGPKIPSIATGMVGALLLLLVVALGIGLFMRRRHIVRKR

SEQ ID NO: 126 - protein, 252 aa, Artificial sequence
  Synthetic polypeptide
  misc_feature: IgG1FcDELTA16_AD
ADVFLFPPKPKDTLMISRTPEVTCVVVDVSHEDPEVKFNWYVDGVEVHNAKTKPREEQYNSTYRVVSVLTVLHQDWLNGKEYKCKVSNKALPAPIEKTISKAKGQPREPQVYTLPPSRDELTKNQVSLTCLVKGFYPSDIAVEWESNGQPENNYKTTPPVLDSDGSFFLYSKLTVDKSRWQQGNVFSCSVMHEALHNHYTQKSLSLSPEGCPTNGPKIPSIATGMVGALLLLLVVALGIGLFMRRRHIVRKR

SEQ ID NO: 127 - protein, 252 aa, Artificial sequence
  Synthetic polypeptide
  misc_feature: IgG1FcDELTA16_GD
GDVFLFPPKPKDTLMISRTPEVTCVVVDVSHEDPEVKFNWYVDGVEVHNAKTKPREEQYNSTYRVVSVLTVLHQDWLNGKEYKCKVSNKALPAPIEKTISKAKGQPREPQVYTLPPSRDELTKNQVSLTCLVKGFYPSDIAVEWESNGQPENNYKTTPPVLDSDGSFFLYSKLTVDKSRWQQGNVFSCSVMHEALHNHYTQKSLSLSPEGCPTNGPKIPSIATGMVGALLLLLVVALGIGLFMRRRHIVRKR

SEQ ID NO: 128 - protein, 252 aa, Artificial sequence
  Synthetic polypeptide
  misc_feature: IgG1FcDELTA16_SW
SWVFLFPPKPKDTLMISRTPEVTCVVVDVSHEDPEVKFNWYVDGVEVHNAKTKPREEQYNSTYRVVSVLTVLHQDWLNGKEYKCKVSNKALPAPIEKTISKAKGQPREPQVYTLPPSRDELTKNQVSLTCLVKGFYPSDIAVEWESNGQPENNYKTTPPVLDSDGSFFLYSKLTVDKSRWQQGNVFSCSVMHEALHNHYTQKSLSLSPEGCPTNGPKIPSIATGMVGALLLLLVVALGIGLFMRRRHIVRKR

SEQ ID NO: 129 - protein, 252 aa, Artificial sequence
  Synthetic polypeptide
  misc_feature: IgG1FcDELTA16_FW
FWVFLFPPKPKDTLMISRTPEVTCVVVDVSHEDPEVKFNWYVDGVEVHNAKTKPREEQYNSTYRVVSVLTVLHQDWLNGKEYKCKVSNKALPAPIEKTISKAKGQPREPQVYTLPPSRDELTKNQVSLTCLVKGFYPSDIAVEWESNGQPENNYKTTPPVLDSDGSFFLYSKLTVDKSRWQQGNVFSCSVMHEALHNHYTQKSLSLSPEGCPTNGPKIPSIATGMVGALLLLLVVALGIGLFMRRRHIVRKR

SEQ ID NO: 130 - protein, 252 aa, Artificial sequence
  Synthetic polypeptide
  misc_feature: IgG1FcDELTA16_YW
YWVFLFPPKPKDTLMISRTPEVTCVVVDVSHEDPEVKFNWYVDGVEVHNAKTKPREEQYNSTYRVVSVLTVLHQDWLNGKEYKCKVSNKALPAPIEKTISKAKGQPREPQVYTLPPSRDELTKNQVSLTCLVKGFYPSDIAVEWESNGQPENNYKTTPPVLDSDGSFFLYSKLTVDKSRWQQGNVFSCSVMHEALHNHYTQKSLSLSPEGCPTNGPKIPSIATGMVGALLLLLVVALGIGLFMRRRHIVRKR

SEQ ID NO: 131 - protein, 252 aa, Artificial sequence
  Synthetic polypeptide
  misc_feature: IgG1FcDELTA16_LW
LWVFLFPPKPKDTLMISRTPEVTCVVVDVSHEDPEVKFNWYVDGVEVHNAKTKPREEQYNSTYRVVSVLTVLHQDWLNGKEYKCKVSNKALPAPIEKTISKAKGQPREPQVYTLPPSRDELTKNQVSLTCLVKGFYPSDIAVEWESNGQPENNYKTTPPVLDSDGSFFLYSKLTVDKSRWQQGNVFSCSVMHEALHNHYTQKSLSLSPEGCPTNGPKIPSIATGMVGALLLLLVVALGIGLFMRRRHIVRKR

SEQ ID NO: 132 - protein, 252 aa, Artificial sequence
  Synthetic polypeptide
  misc_feature: IgG1FcDELTA16_HW
HWVFLFPPKPKDTLMISRTPEVTCVVVDVSHEDPEVKFNWYVDGVEVHNAKTKPREEQYNSTYRVVSVLTVLHQDWLNGKEYKCKVSNKALPAPIEKTISKAKGQPREPQVYTLPPSRDELTKNQVSLTCLVKGFYPSDIAVEWESNGQPENNYKTTPPVLDSDGSFFLYSKLTVDKSRWQQGNVFSCSVMHEALHNHYTQKSLSLSPEGCPTNGPKIPSIATGMVGALLLLLVVALGIGLFMRRRHIVRKR

SEQ ID NO: 133 - protein, 252 aa, Artificial sequence
  Synthetic polypeptide
  misc_feature: IgG1FcDELTA16_QW
QWVFLFPPKPKDTLMISRTPEVTCVVVDVSHEDPEVKFNWYVDGVEVHNAKTKPREEQYNSTYRVVSVLTVLHQDWLNGKEYKCKVSNKALPAPIEKTISKAKGQPREPQVYTLPPSRDELTKNQVSLTCLVKGFYPSDIAVEWESNGQPENNYKTTPPVLDSDGSFFLYSKLTVDKSRWQQGNVFSCSVMHEALHNHYTQKSLSLSPEGCPTNGPKIPSIATGMVGALLLLLVVALGIGLFMRRRHIVRKR

SEQ ID NO: 134 - protein, 252 aa, Artificial sequence
  Synthetic polypeptide
  misc_feature: IgG1FcDELTA16_IW
IWVFLFPPKPKDTLMISRTPEVTCVVVDVSHEDPEVKFNWYVDGVEVHNAKTKPREEQYNSTYRVVSVLTVLHQDWLNGKEYKCKVSNKALPAPIEKTISKAKGQPREPQVYTLPPSRDELTKNQVSLTCLVKGFYPSDIAVEWESNGQPENNYKTTPPVLDSDGSFFLYSKLTVDKSRWQQGNVFSCSVMHEALHNHYTQKSLSLSPEGCPTNGPKIPSIATGMVGALLLLLVVALGIGLFMRRRHIVRKR

SEQ ID NO: 135 - protein, 252 aa, Artificial sequence
  Synthetic polypeptide
  misc_feature: IgG1FcDELTA16_MW
MWVFLFPPKPKDTLMISRTPEVTCVVVDVSHEDPEVKFNWYVDGVEVHNAKTKPREEQYNSTYRVVSVLTVLHQDWLNGKEYKCKVSNKALPAPIEKTISKAKGQPREPQVYTLPPSRDELTKNQVSLTCLVKGFYPSDIAVEWESNGQPENNYKTTPPVLDSDGSFFLYSKLTVDKSRWQQGNVFSCSVMHEALHNHYTQKSLSLSPEGCPTNGPKIPSIATGMVGALLLLLVVALGIGLFMRRRHIVRKR

SEQ ID NO: 136 - protein, 252 aa, Artificial sequence
  Synthetic polypeptide
  misc_feature: IgG1FcDELTA16_NW
NWVFLFPPKPKDTLMISRTPEVTCVVVDVSHEDPEVKFNWYVDGVEVHNAKTKPREEQYNSTYRVVSVLTVLHQDWLNGKEYKCKVSNKALPAPIEKTISKAKGQPREPQVYTLPPSRDELTKNQVSLTCLVKGFYPSDIAVEWESNGQPENNYKTTPPVLDSDGSFFLYSKLTVDKSRWQQGNVFSCSVMHEALHNHYTQKSLSLSPEGCPTNGPKIPSIATGMVGALLLLLVVALGIGLFMRRRHIVRKR

SEQ ID NO: 137 - protein, 252 aa, Artificial sequence
  Synthetic polypeptide
  misc_feature: IgG1FcDELTA16_KW
KWVFLFPPKPKDTLMISRTPEVTCVVVDVSHEDPEVKFNWYVDGVEVHNAKTKPREEQYNSTYRVVSVLTVLHQDWLNGKEYKCKVSNKALPAPIEKTISKAKGQPREPQVYTLPPSRDELTKNQVSLTCLVKGFYPSDIAVEWESNGQPENNYKTTPPVLDSDGSFFLYSKLTVDKSRWQQGNVFSCSVMHEALHNHYTQKSLSLSPEGCPTNGPKIPSIATGMVGALLLLLVVALGIGLFMRRRHIVRKR

SEQ ID NO: 138 - protein, 252 aa, Artificial sequence
  Synthetic polypeptide
  misc_feature: IgG1FcDELTA16_VW
VWVFLFPPKPKDTLMISRTPEVTCVVVDVSHEDPEVKFNWYVDGVEVHNAKTKPREEQYNSTYRVVSVLTVLHQDWLNGKEYKCKVSNKALPAPIEKTISKAKGQPREPQVYTLPPSRDELTKNQVSLTCLVKGFYPSDIAVEWESNGQPENNYKTTPPVLDSDGSFFLYSKLTVDKSRWQQGNVFSCSVMHEALHNHYTQKSLSLSPEGCPTNGPKIPSIATGMVGALLLLLVVALGIGLFMRRRHIVRKR

SEQ ID NO: 139 - protein, 252 aa, Artificial sequence
  Synthetic polypeptide
  misc_feature: IgG1FcDELTA16_EW
EWVFLFPPKPKDTLMISRTPEVTCVVVDVSHEDPEVKFNWYVDGVEVHNAKTKPREEQYNSTYRVVSVLTVLHQDWLNGKEYKCKVSNKALPAPIEKTISKAKGQPREPQVYTLPPSRDELTKNQVSLTCLVKGFYPSDIAVEWESNGQPENNYKTTPPVLDSDGSFFLYSKLTVDKSRWQQGNVFSCSVMHEALHNHYTQKSLSLSPEGCPTNGPKIPSIATGMVGALLLLLVVALGIGLFMRRRHIVRKR

SEQ ID NO: 140 - protein, 252 aa, Artificial sequence
  Synthetic polypeptide
  misc_feature: IgG1FcDELTA16_DW
DWVFLFPPKPKDTLMISRTPEVTCVVVDVSHEDPEVKFNWYVDGVEVHNAKTKPREEQYNSTYRVVSVLTVLHQDWLNGKEYKCKVSNKALPAPIEKTISKAKGQPREPQVYTLPPSRDELTKNQVSLTCLVKGFYPSDIAVEWESNGQPENNYKTTPPVLDSDGSFFLYSKLTVDKSRWQQGNVFSCSVMHEALHNHYTQKSLSLSPEGCPTNGPKIPSIATGMVGALLLLLVVALGIGLFMRRRHIVRKR

SEQ ID NO: 141 - protein, 252 aa, Artificial sequence
  Synthetic polypeptide
  misc_feature: IgG1FcDELTA16_CW
CWVFLFPPKPKDTLMISRTPEVTCVVVDVSHEDPEVKFNWYVDGVEVHNAKTKPREEQYNSTYRVVSVLTVLHQDWLNGKEYKCKVSNKALPAPIEKTISKAKGQPREPQVYTLPPSRDELTKNQVSLTCLVKGFYPSDIAVEWESNGQPENNYKTTPPVLDSDGSFFLYSKLTVDKSRWQQGNVFSCSVMHEALHNHYTQKSLSLSPEGCPTNGPKIPSIATGMVGALLLLLVVALGIGLFMRRRHIVRKR

SEQ ID NO: 142 - protein, 252 aa, Artificial sequence
  Synthetic polypeptide
  misc_feature: IgG1FcDELTA16_WW
WWVFLFPPKPKDTLMISRTPEVTCVVVDVSHEDPEVKFNWYVDGVEVHNAKTKPREEQYNSTYRVVSVLTVLHQDWLNGKEYKCKVSNKALPAPIEKTISKAKGQPREPQVYTLPPSRDELTKNQVSLTCLVKGFYPSDIAVEWESNGQPENNYKTTPPVLDSDGSFFLYSKLTVDKSRWQQGNVFSCSVMHEALHNHYTQKSLSLSPEGCPTNGPKIPSIATGMVGALLLLLVVALGIGLFMRRRHIVRKR

SEQ ID NO: 143 - protein, 252 aa, Artificial sequence
  Synthetic polypeptide
  misc_feature: IgG1FcDELTA16_PW
PWVFLFPPKPKDTLMISRTPEVTCVVVDVSHEDPEVKFNWYVDGVEVHNAKTKPREEQYNSTYRVVSVLTVLHQDWLNGKEYKCKVSNKALPAPIEKTISKAKGQPREPQVYTLPPSRDELTKNQVSLTCLVKGFYPSDIAVEWESNGQPENNYKTTPPVLDSDGSFFLYSKLTVDKSRWQQGNVFSCSVMHEALHNHYTQKSLSLSPEGCPTNGPKIPSIATGMVGALLLLLVVALGIGLFMRRRHIVRKR

SEQ ID NO: 144 - protein, 252 aa, Artificial sequence
  Synthetic polypeptide
  misc_feature: IgG1FcDELTA16_RW
RWVFLFPPKPKDTLMISRTPEVTCVVVDVSHEDPEVKFNWYVDGVEVHNAKTKPREEQYNSTYRVVSVLTVLHQDWLNGKEYKCKVSNKALPAPIEKTISKAKGQPREPQVYTLPPSRDELTKNQVSLTCLVKGFYPSDIAVEWESNGQPENNYKTTPPVLDSDGSFFLYSKLTVDKSRWQQGNVFSCSVMHEALHNHYTQKSLSLSPEGCPTNGPKIPSIATGMVGALLLLLVVALGIGLFMRRRHIVRKR

SEQ ID NO: 145 - protein, 252 aa, Artificial sequence
  Synthetic polypeptide
  misc_feature: IgG1FcDELTA16_TW
TWVFLFPPKPKDTLMISRTPEVTCVVVDVSHEDPEVKFNWYVDGVEVHNAKTKPREEQYNSTYRVVSVLTVLHQDWLNGKEYKCKVSNKALPAPIEKTISKAKGQPREPQVYTLPPSRDELTKNQVSLTCLVKGFYPSDIAVEWESNGQPENNYKTTPPVLDSDGSFFLYSKLTVDKSRWQQGNVFSCSVMHEALHNHYTQKSLSLSPEGCPTNGPKIPSIATGMVGALLLLLVVALGIGLFMRRRHIVRKR

SEQ ID NO: 146 - protein, 252 aa, Artificial sequence
  Synthetic polypeptide
  misc_feature: IgG1FcDELTA16_AW
AWVFLFPPKPKDTLMISRTPEVTCVVVDVSHEDPEVKFNWYVDGVEVHNAKTKPREEQYNSTYRVVSVLTVLHQDWLNGKEYKCKVSNKALPAPIEKTISKAKGQPREPQVYTLPPSRDELTKNQVSLTCLVKGFYPSDIAVEWESNGQPENNYKTTPPVLDSDGSFFLYSKLTVDKSRWQQGNVFSCSVMHEALHNHYTQKSLSLSPEGCPTNGPKIPSIATGMVGALLLLLVVALGIGLFMRRRHIVRKR

SEQ ID NO: 147 - protein, 252 aa, Artificial sequence
  Synthetic polypeptide
  misc_feature: IgG1FcDELTA16_GW
GWVFLFPPKPKDTLMISRTPEVTCVVVDVSHEDPEVKFNWYVDGVEVHNAKTKPREEQYNSTYRVVSVLTVLHQDWLNGKEYKCKVSNKALPAPIEKTISKAKGQPREPQVYTLPPSRDELTKNQVSLTCLVKGFYPSDIAVEWESNGQPENNYKTTPPVLDSDGSFFLYSKLTVDKSRWQQGNVFSCSVMHEALHNHYTQKSLSLSPEGCPTNGPKIPSIATGMVGALLLLLVVALGIGLFMRRRHIVRKR

SEQ ID NO: 148 - protein, 252 aa, Artificial sequence
  Synthetic polypeptide
  misc_feature: IgG1FcDELTA16_SE
SEVFLFPPKPKDTLMISRTPEVTCVVVDVSHEDPEVKFNWYVDGVEVHNAKTKPREEQYNSTYRVVSVLTVLHQDWLNGKEYKCKVSNKALPAPIEKTISKAKGQPREPQVYTLPPSRDELTKNQVSLTCLVKGFYPSDIAVEWESNGQPENNYKTTPPVLDSDGSFFLYSKLTVDKSRWQQGNVFSCSVMHEALHNHYTQKSLSLSPEGCPTNGPKIPSIATGMVGALLLLLVVALGIGLFMRRRHIVRKR

SEQ ID NO: 149 - protein, 252 aa, Artificial sequence
  Synthetic polypeptide
  misc_feature: IgG1FcDELTA16_FE
FEVFLFPPKPKDTLMISRTPEVTCVVVDVSHEDPEVKFNWYVDGVEVHNAKTKPREEQYNSTYRVVSVLTVLHQDWLNGKEYKCKVSNKALPAPIEKTISKAKGQPREPQVYTLPPSRDELTKNQVSLTCLVKGFYPSDIAVEWESNGQPENNYKTTPPVLDSDGSFFLYSKLTVDKSRWQQGNVFSCSVMHEALHNHYTQKSLSLSPEGCPTNGPKIPSIATGMVGALLLLLVVALGIGLFMRRRHIVRKR

SEQ ID NO: 150 - protein, 252 aa, Artificial sequence
  Synthetic polypeptide
  misc_feature: IgG1FcDELTA16_YE
YEVFLFPPKPKDTLMISRTPEVTCVVVDVSHEDPEVKFNWYVDGVEVHNAKTKPREEQYNSTYRVVSVLTVLHQDWLNGKEYKCKVSNKALPAPIEKTISKAKGQPREPQVYTLPPSRDELTKNQVSLTCLVKGFYPSDIAVEWESNGQPENNYKTTPPVLDSDGSFFLYSKLTVDKSRWQQGNVFSCSVMHEALHNHYTQKSLSLSPEGCPTNGPKIPSIATGMVGALLLLLVVALGIGLFMRRRHIVRKR

SEQ ID NO: 151 - protein, 252 aa, Artificial sequence
  Synthetic polypeptide
  misc_feature: IgG1FcDELTA16_LE
LEVFLFPPKPKDTLMISRTPEVTCVVVDVSHEDPEVKFNWYVDGVEVHNAKTKPREEQYNSTYRVVSVLTVLHQDWLNGKEYKCKVSNKALPAPIEKTISKAKGQPREPQVYTLPPSRDELTKNQVSLTCLVKGFYPSDIAVEWESNGQPENNYKTTPPVLDSDGSFFLYSKLTVDKSRWQQGNVFSCSVMHEALHNHYTQKSLSLSPEGCPTNGPKIPSIATGMVGALLLLLVVALGIGLFMRRRHIVRKR

SEQ ID NO: 152 - protein, 252 aa, Artificial sequence
  Synthetic polypeptide
  misc_feature: IgG1FcDELTA16_HE
HEVFLFPPKPKDTLMISRTPEVTCVVVDVSHEDPEVKFNWYVDGVEVHNAKTKPREEQYNSTYRVVSVLTVLHQDWLNGKEYKCKVSNKALPAPIEKTISKAKGQPREPQVYTLPPSRDELTKNQVSLTCLVKGFYPSDIAVEWESNGQPENNYKTTPPVLDSDGSFFLYSKLTVDKSRWQQGNVFSCSVMHEALHNHYTQKSLSLSPEGCPTNGPKIPSIATGMVGALLLLLVVALGIGLFMRRRHIVRKR

SEQ ID NO: 153 - protein, 252 aa, Artificial sequence
  Synthetic polypeptide
  misc_feature: IgG1FcDELTA16_QE
QEVFLFPPKPKDTLMISRTPEVTCVVVDVSHEDPEVKFNWYVDGVEVHNAKTKPREEQYNSTYRVVSVLTVLHQDWLNGKEYKCKVSNKALPAPIEKTISKAKGQPREPQVYTLPPSRDELTKNQVSLTCLVKGFYPSDIAVEWESNGQPENNYKTTPPVLDSDGSFFLYSKLTVDKSRWQQGNVFSCSVMHEALHNHYTQKSLSLSPEGCPTNGPKIPSIATGMVGALLLLLVVALGIGLFMRRRHIVRKR

SEQ ID NO: 154 - protein, 252 aa, Artificial sequence
  Synthetic polypeptide
  misc_feature: IgG1FcDELTA16_IE
IEVFLFPPKPKDTLMISRTPEVTCVVVDVSHEDPEVKFNWYVDGVEVHNAKTKPREEQYNSTYRVVSVLTVLHQDWLNGKEYKCKVSNKALPAPIEKTISKAKGQPREPQVYTLPPSRDELTKNQVSLTCLVKGFYPSDIAVEWESNGQPENNYKTTPPVLDSDGSFFLYSKLTVDKSRWQQGNVFSCSVMHEALHNHYTQKSLSLSPEGCPTNGPKIPSIATGMVGALLLLLVVALGIGLFMRRRHIVRKR

SEQ ID NO: 155 - protein, 252 aa, Artificial sequence
  Synthetic polypeptide
  misc_feature: IgG1FcDELTA16_ME
MEVFLFPPKPKDTLMISRTPEVTCVVVDVSHEDPEVKFNWYVDGVEVHNAKTKPREEQYNSTYRVVSVLTVLHQDWLNGKEYKCKVSNKALPAPIEKTISKAKGQPREPQVYTLPPSRDELTKNQVSLTCLVKGFYPSDIAVEWESNGQPENNYKTTPPVLDSDGSFFLYSKLTVDKSRWQQGNVFSCSVMHEALHNHYTQKSLSLSPEGCPTNGPKIPSIATGMVGALLLLLVVALGIGLFMRRRHIVRKR

SEQ ID NO: 156 - protein, 252 aa, Artificial sequence
  Synthetic polypeptide
  misc_feature: IgG1FcDELTA16_NE
NEVFLFPPKPKDTLMISRTPEVTCVVVDVSHEDPEVKFNWYVDGVEVHNAKTKPREEQYNSTYRVVSVLTVLHQDWLNGKEYKCKVSNKALPAPIEKTISKAKGQPREPQVYTLPPSRDELTKNQVSLTCLVKGFYPSDIAVEWESNGQPENNYKTTPPVLDSDGSFFLYSKLTVDKSRWQQGNVFSCSVMHEALHNHYTQKSLSLSPEGCPTNGPKIPSIATGMVGALLLLLVVALGIGLFMRRRHIVRKR

SEQ ID NO: 157 - protein, 252 aa, Artificial sequence
  Synthetic polypeptide
  misc_feature: IgG1FcDELTA16_KE
KEVFLFPPKPKDTLMISRTPEVTCVVVDVSHEDPEVKFNWYVDGVEVHNAKTKPREEQYNSTYRVVSVLTVLHQDWLNGKEYKCKVSNKALPAPIEKTISKAKGQPREPQVYTLPPSRDELTKNQVSLTCLVKGFYPSDIAVEWESNGQPENNYKTTPPVLDSDGSFFLYSKLTVDKSRWQQGNVFSCSVMHEALHNHYTQKSLSLSPEGCPTNGPKIPSIATGMVGALLLLLVVALGIGLFMRRRHIVRKR

SEQ ID NO: 158 - protein, 252 aa, Artificial sequence
  Synthetic polypeptide
  misc_feature: IgG1FcDELTA16_VE
VEVFLFPPKPKDTLMISRTPEVTCVVVDVSHEDPEVKFNWYVDGVEVHNAKTKPREEQYNSTYRVVSVLTVLHQDWLNGKEYKCKVSNKALPAPIEKTISKAKGQPREPQVYTLPPSRDELTKNQVSLTCLVKGFYPSDIAVEWESNGQPENNYKTTPPVLDSDGSFFLYSKLTVDKSRWQQGNVFSCSVMHEALHNHYTQKSLSLSPEGCPTNGPKIPSIATGMVGALLLLLVVALGIGLFMRRRHIVRKR

SEQ ID NO: 159 - protein, 252 aa, Artificial sequence
  Synthetic polypeptide
  misc_feature: IgG1FcDELTA16_EE
EEVFLFPPKPKDTLMISRTPEVTCVVVDVSHEDPEVKFNWYVDGVEVHNAKTKPREEQYNSTYRVVSVLTVLHQDWLNGKEYKCKVSNKALPAPIEKTISKAKGQPREPQVYTLPPSRDELTKNQVSLTCLVKGFYPSDIAVEWESNGQPENNYKTTPPVLDSDGSFFLYSKLTVDKSRWQQGNVFSCSVMHEALHNHYTQKSLSLSPEGCPTNGPKIPSIATGMVGALLLLLVVALGIGLFMRRRHIVRKR

SEQ ID NO: 160 - protein, 252 aa, Artificial sequence
  Synthetic polypeptide
  misc_feature: IgG1FcDELTA16_DE
DEVFLFPPKPKDTLMISRTPEVTCVVVDVSHEDPEVKFNWYVDGVEVHNAKTKPREEQYNSTYRVVSVLTVLHQDWLNGKEYKCKVSNKALPAPIEKTISKAKGQPREPQVYTLPPSRDELTKNQVSLTCLVKGFYPSDIAVEWESNGQPENNYKTTPPVLDSDGSFFLYSKLTVDKSRWQQGNVFSCSVMHEALHNHYTQKSLSLSPEGCPTNGPKIPSIATGMVGALLLLLVVALGIGLFMRRRHIVRKR

SEQ ID NO: 161 - protein, 252 aa, Artificial sequence
  Synthetic polypeptide
  misc_feature: IgG1FcDELTA16_CE
CEVFLFPPKPKDTLMISRTPEVTCVVVDVSHEDPEVKFNWYVDGVEVHNAKTKPREEQYNSTYRVVSVLTVLHQDWLNGKEYKCKVSNKALPAPIEKTISKAKGQPREPQVYTLPPSRDELTKNQVSLTCLVKGFYPSDIAVEWESNGQPENNYKTTPPVLDSDGSFFLYSKLTVDKSRWQQGNVFSCSVMHEALHNHYTQKSLSLSPEGCPTNGPKIPSIATGMVGALLLLLVVALGIGLFMRRRHIVRKR

SEQ ID NO: 162 - protein, 252 aa, Artificial sequence
  Synthetic polypeptide
  misc_feature: IgG1FcDELTA16_WE
WEVFLFPPKPKDTLMISRTPEVTCVVVDVSHEDPEVKFNWYVDGVEVHNAKTKPREEQYNSTYRVVSVLTVLHQDWLNGKEYKCKVSNKALPAPIEKTISKAKGQPREPQVYTLPPSRDELTKNQVSLTCLVKGFYPSDIAVEWESNGQPENNYKTTPPVLDSDGSFFLYSKLTVDKSRWQQGNVFSCSVMHEALHNHYTQKSLSLSPEGCPTNGPKIPSIATGMVGALLLLLVVALGIGLFMRRRHIVRKR

SEQ ID NO: 163 - protein, 252 aa, Artificial sequence
  Synthetic polypeptide
  misc_feature: IgG1FcDELTA16_PE
PEVFLFPPKPKDTLMISRTPEVTCVVVDVSHEDPEVKFNWYVDGVEVHNAKTKPREEQYNSTYRVVSVLTVLHQDWLNGKEYKCKVSNKALPAPIEKTISKAKGQPREPQVYTLPPSRDELTKNQVSLTCLVKGFYPSDIAVEWESNGQPENNYKTTPPVLDSDGSFFLYSKLTVDKSRWQQGNVFSCSVMHEALHNHYTQKSLSLSPEGCPTNGPKIPSIATGMVGALLLLLVVALGIGLFMRRRHIVRKR

SEQ ID NO: 164 - protein, 252 aa, Artificial sequence
  Synthetic polypeptide
  misc_feature: IgG1FcDELTA16_RE
REVFLFPPKPKDTLMISRTPEVTCVVVDVSHEDPEVKFNWYVDGVEVHNAKTKPREEQYNSTYRVVSVLTVLHQDWLNGKEYKCKVSNKALPAPIEKTISKAKGQPREPQVYTLPPSRDELTKNQVSLTCLVKGFYPSDIAVEWESNGQPENNYKTTPPVLDSDGSFFLYSKLTVDKSRWQQGNVFSCSVMHEALHNHYTQKSLSLSPEGCPTNGPKIPSIATGMVGALLLLLVVALGIGLFMRRRHIVRKR

SEQ ID NO: 165 - protein, 252 aa, Artificial sequence
  Synthetic polypeptide
  misc_feature: IgG1FcDELTA16_TE
TEVFLFPPKPKDTLMISRTPEVTCVVVDVSHEDPEVKFNWYVDGVEVHNAKTKPREEQYNSTYRVVSVLTVLHQDWLNGKEYKCKVSNKALPAPIEKTISKAKGQPREPQVYTLPPSRDELTKNQVSLTCLVKGFYPSDIAVEWESNGQPENNYKTTPPVLDSDGSFFLYSKLTVDKSRWQQGNVFSCSVMHEALHNHYTQKSLSLSPEGCPTNGPKIPSIATGMVGALLLLLVVALGIGLFMRRRHIVRKR

SEQ ID NO: 166 - protein, 252 aa, Artificial sequence
  Synthetic polypeptide
  misc_feature: IgG1FcDELTA16_AE
AEVFLFPPKPKDTLMISRTPEVTCVVVDVSHEDPEVKFNWYVDGVEVHNAKTKPREEQYNSTYRVVSVLTVLHQDWLNGKEYKCKVSNKALPAPIEKTISKAKGQPREPQVYTLPPSRDELTKNQVSLTCLVKGFYPSDIAVEWESNGQPENNYKTTPPVLDSDGSFFLYSKLTVDKSRWQQGNVFSCSVMHEALHNHYTQKSLSLSPEGCPTNGPKIPSIATGMVGALLLLLVVALGIGLFMRRRHIVRKR

SEQ ID NO: 167 - protein, 252 aa, Artificial sequence
  Synthetic polypeptide
  misc_feature: IgG1FcDELTA16_GE
GEVFLFPPKPKDTLMISRTPEVTCVVVDVSHEDPEVKFNWYVDGVEVHNAKTKPREEQYNSTYRVVSVLTVLHQDWLNGKEYKCKVSNKALPAPIEKTISKAKGQPREPQVYTLPPSRDELTKNQVSLTCLVKGFYPSDIAVEWESNGQPENNYKTTPPVLDSDGSFFLYSKLTVDKSRWQQGNVFSCSVMHEALHNHYTQKSLSLSPEGCPTNGPKIPSIATGMVGALLLLLVVALGIGLFMRRRHIVRKR

SEQ ID NO: 168 - protein, 252 aa, Artificial sequence
  Synthetic polypeptide
  misc_feature: IgG1FcDELTA16_SQ
SQVFLFPPKPKDTLMISRTPEVTCVVVDVSHEDPEVKFNWYVDGVEVHNAKTKPREEQYNSTYRVVSVLTVLHQDWLNGKEYKCKVSNKALPAPIEKTISKAKGQPREPQVYTLPPSRDELTKNQVSLTCLVKGFYPSDIAVEWESNGQPENNYKTTPPVLDSDGSFFLYSKLTVDKSRWQQGNVFSCSVMHEALHNHYTQKSLSLSPEGCPTNGPKIPSIATGMVGALLLLLVVALGIGLFMRRRHIVRKR

SEQ ID NO: 169 - protein, 252 aa, Artificial sequence
  Synthetic polypeptide
  misc_feature: IgG1FcDELTA16_FQ
FQVFLFPPKPKDTLMISRTPEVTCVVVDVSHEDPEVKFNWYVDGVEVHNAKTKPREEQYNSTYRVVSVLTVLHQDWLNGKEYKCKVSNKALPAPIEKTISKAKGQPREPQVYTLPPSRDELTKNQVSLTCLVKGFYPSDIAVEWESNGQPENNYKTTPPVLDSDGSFFLYSKLTVDKSRWQQGNVFSCSVMHEALHNHYTQKSLSLSPEGCPTNGPKIPSIATGMVGALLLLLVVALGIGLFMRRRHIVRKR

SEQ ID NO: 170 - protein, 252 aa, Artificial sequence
  Synthetic polypeptide
  misc_feature: IgG1FcDELTA16_YQ
YQVFLFPPKPKDTLMISRTPEVTCVVVDVSHEDPEVKFNWYVDGVEVHNAKTKPREEQYNSTYRVVSVLTVLHQDWLNGKEYKCKVSNKALPAPIEKTISKAKGQPREPQVYTLPPSRDELTKNQVSLTCLVKGFYPSDIAVEWESNGQPENNYKTTPPVLDSDGSFFLYSKLTVDKSRWQQGNVFSCSVMHEALHNHYTQKSLSLSPEGCPTNGPKIPSIATGMVGALLLLLVVALGIGLFMRRRHIVRKR

SEQ ID NO: 171 - protein, 252 aa, Artificial sequence
  Synthetic polypeptide
  misc_feature: IgG1FcDELTA16_LQ
LQVFLFPPKPKDTLMISRTPEVTCVVVDVSHEDPEVKFNWYVDGVEVHNAKTKPREEQYNSTYRVVSVLTVLHQDWLNGKEYKCKVSNKALPAPIEKTISKAKGQPREPQVYTLPPSRDELTKNQVSLTCLVKGFYPSDIAVEWESNGQPENNYKTTPPVLDSDGSFFLYSKLTVDKSRWQQGNVFSCSVMHEALHNHYTQKSLSLSPEGCPTNGPKIPSIATGMVGALLLLLVVALGIGLFMRRRHIVRKR

SEQ ID NO: 172 - protein, 252 aa, Artificial sequence
  Synthetic polypeptide
  misc_feature: IgG1FcDELTA16_HQ
HQVFLFPPKPKDTLMISRTPEVTCVVVDVSHEDPEVKFNWYVDGVEVHNAKTKPREEQYNSTYRVVSVLTVLHQDWLNGKEYKCKVSNKALPAPIEKTISKAKGQPREPQVYTLPPSRDELTKNQVSLTCLVKGFYPSDIAVEWESNGQPENNYKTTPPVLDSDGSFFLYSKLTVDKSRWQQGNVFSCSVMHEALHNHYTQKSLSLSPEGCPTNGPKIPSIATGMVGALLLLLVVALGIGLFMRRRHIVRKR

SEQ ID NO: 173 - protein, 252 aa, Artificial sequence
  Synthetic polypeptide
  misc_feature: IgG1FcDELTA16_QQ
QQVFLFPPKPKDTLMISRTPEVTCVVVDVSHEDPEVKFNWYVDGVEVHNAKTKPREEQYNSTYRVVSVLTVLHQDWLNGKEYKCKVSNKALPAPIEKTISKAKGQPREPQVYTLPPSRDELTKNQVSLTCLVKGFYPSDIAVEWESNGQPENNYKTTPPVLDSDGSFFLYSKLTVDKSRWQQGNVFSCSVMHEALHNHYTQKSLSLSPEGCPTNGPKIPSIATGMVGALLLLLVVALGIGLFMRRRHIVRKR

SEQ ID NO: 174 - protein, 252 aa, Artificial sequence
  Synthetic polypeptide
  misc_feature: IgG1FcDELTA16_IQ
IQVFLFPPKPKDTLMISRTPEVTCVVVDVSHEDPEVKFNWYVDGVEVHNAKTKPREEQYNSTYRVVSVLTVLHQDWLNGKEYKCKVSNKALPAPIEKTISKAKGQPREPQVYTLPPSRDELTKNQVSLTCLVKGFYPSDIAVEWESNGQPENNYKTTPPVLDSDGSFFLYSKLTVDKSRWQQGNVFSCSVMHEALHNHYTQKSLSLSPEGCPTNGPKIPSIATGMVGALLLLLVVALGIGLFMRRRHIVRKR

SEQ ID NO: 175 - protein, 252 aa, Artificial sequence
  Synthetic polypeptide
  misc_feature: IgG1FcDELTA16_MQ
MQVFLFPPKPKDTLMISRTPEVTCVVVDVSHEDPEVKFNWYVDGVEVHNAKTKPREEQYNSTYRVVSVLTVLHQDWLNGKEYKCKVSNKALPAPIEKTISKAKGQPREPQVYTLPPSRDELTKNQVSLTCLVKGFYPSDIAVEWESNGQPENNYKTTPPVLDSDGSFFLYSKLTVDKSRWQQGNVFSCSVMHEALHNHYTQKSLSLSPEGCPTNGPKIPSIATGMVGALLLLLVVALGIGLFMRRRHIVRKR

SEQ ID NO: 176 - protein, 252 aa, Artificial sequence
  Synthetic polypeptide
  misc_feature: IgG1FcDELTA16_NQ
NQVFLFPPKPKDTLMISRTPEVTCVVVDVSHEDPEVKFNWYVDGVEVHNAKTKPREEQYNSTYRVVSVLTVLHQDWLNGKEYKCKVSNKALPAPIEKTISKAKGQPREPQVYTLPPSRDELTKNQVSLTCLVKGFYPSDIAVEWESNGQPENNYKTTPPVLDSDGSFFLYSKLTVDKSRWQQGNVFSCSVMHEALHNHYTQKSLSLSPEGCPTNGPKIPSIATGMVGALLLLLVVALGIGLFMRRRHIVRKR

SEQ ID NO: 177 - protein, 252 aa, Artificial sequence
  Synthetic polypeptide
  misc_feature: IgG1FcDELTA16_KQ
KQVFLFPPKPKDTLMISRTPEVTCVVVDVSHEDPEVKFNWYVDGVEVHNAKTKPREEQYNSTYRVVSVLTVLHQDWLNGKEYKCKVSNKALPAPIEKTISKAKGQPREPQVYTLPPSRDELTKNQVSLTCLVKGFYPSDIAVEWESNGQPENNYKTTPPVLDSDGSFFLYSKLTVDKSRWQQGNVFSCSVMHEALHNHYTQKSLSLSPEGCPTNGPKIPSIATGMVGALLLLLVVALGIGLFMRRRHIVRKR

SEQ ID NO: 178 - protein, 252 aa, Artificial sequence
  Synthetic polypeptide
  misc_feature: IgG1FcDELTA16_VQ
VQVFLFPPKPKDTLMISRTPEVTCVVVDVSHEDPEVKFNWYVDGVEVHNAKTKPREEQYNSTYRVVSVLTVLHQDWLNGKEYKCKVSNKALPAPIEKTISKAKGQPREPQVYTLPPSRDELTKNQVSLTCLVKGFYPSDIAVEWESNGQPENNYKTTPPVLDSDGSFFLYSKLTVDKSRWQQGNVFSCSVMHEALHNHYTQKSLSLSPEGCPTNGPKIPSIATGMVGALLLLLVVALGIGLFMRRRHIVRKR

SEQ ID NO: 179 - protein, 252 aa, Artificial sequence
  Synthetic polypeptide
  misc_feature: IgG1FcDELTA16_EQ
EQVFLFPPKPKDTLMISRTPEVTCVVVDVSHEDPEVKFNWYVDGVEVHNAKTKPREEQYNSTYRVVSVLTVLHQDWLNGKEYKCKVSNKALPAPIEKTISKAKGQPREPQVYTLPPSRDELTKNQVSLTCLVKGFYPSDIAVEWESNGQPENNYKTTPPVLDSDGSFFLYSKLTVDKSRWQQGNVFSCSVMHEALHNHYTQKSLSLSPEGCPTNGPKIPSIATGMVGALLLLLVVALGIGLFMRRRHIVRKR

SEQ ID NO: 180 - protein, 252 aa, Artificial sequence
  Synthetic polypeptide
  misc_feature: IgG1FcDELTA16_DQ
DQVFLFPPKPKDTLMISRTPEVTCVVVDVSHEDPEVKFNWYVDGVEVHNAKTKPREEQYNSTYRVVSVLTVLHQDWLNGKEYKCKVSNKALPAPIEKTISKAKGQPREPQVYTLPPSRDELTKNQVSLTCLVKGFYPSDIAVEWESNGQPENNYKTTPPVLDSDGSFFLYSKLTVDKSRWQQGNVFSCSVMHEALHNHYTQKSLSLSPEGCPTNGPKIPSIATGMVGALLLLLVVALGIGLFMRRRHIVRKR

SEQ ID NO: 181 - protein, 252 aa, Artificial sequence
  Synthetic polypeptide
  misc_feature: IgG1FcDELTA16_CQ
CQVFLFPPKPKDTLMISRTPEVTCVVVDVSHEDPEVKFNWYVDGVEVHNAKTKPREEQYNSTYRVVSVLTVLHQDWLNGKEYKCKVSNKALPAPIEKTISKAKGQPREPQVYTLPPSRDELTKNQVSLTCLVKGFYPSDIAVEWESNGQPENNYKTTPPVLDSDGSFFLYSKLTVDKSRWQQGNVFSCSVMHEALHNHYTQKSLSLSPEGCPTNGPKIPSIATGMVGALLLLLVVALGIGLFMRRRHIVRKR

SEQ ID NO: 182 - protein, 252 aa, Artificial sequence
  Synthetic polypeptide
  misc_feature: IgG1FcDELTA16_WQ
WQVFLFPPKPKDTLMISRTPEVTCVVVDVSHEDPEVKFNWYVDGVEVHNAKTKPREEQYNSTYRVVSVLTVLHQDWLNGKEYKCKVSNKALPAPIEKTISKAKGQPREPQVYTLPPSRDELTKNQVSLTCLVKGFYPSDIAVEWESNGQPENNYKTTPPVLDSDGSFFLYSKLTVDKSRWQQGNVFSCSVMHEALHNHYTQKSLSLSPEGCPTNGPKIPSIATGMVGALLLLLVVALGIGLFMRRRHIVRKR

SEQ ID NO: 183 - protein, 252 aa, Artificial sequence
  Synthetic polypeptide
  misc_feature: IgG1FcDELTA16_PQ
PQVFLFPPKPKDTLMISRTPEVTCVVVDVSHEDPEVKFNWYVDGVEVHNAKTKPREEQYNSTYRVVSVLTVLHQDWLNGKEYKCKVSNKALPAPIEKTISKAKGQPREPQVYTLPPSRDELTKNQVSLTCLVKGFYPSDIAVEWESNGQPENNYKTTPPVLDSDGSFFLYSKLTVDKSRWQQGNVFSCSVMHEALHNHYTQKSLSLSPEGCPTNGPKIPSIATGMVGALLLLLVVALGIGLFMRRRHIVRKR

SEQ ID NO: 184 - protein, 252 aa, Artificial sequence
  Synthetic polypeptide
  misc_feature: IgG1FcDELTA16_RQ
RQVFLFPPKPKDTLMISRTPEVTCVVVDVSHEDPEVKFNWYVDGVEVHNAKTKPREEQYNSTYRVVSVLTVLHQDWLNGKEYKCKVSNKALPAPIEKTISKAKGQPREPQVYTLPPSRDELTKNQVSLTCLVKGFYPSDIAVEWESNGQPENNYKTTPPVLDSDGSFFLYSKLTVDKSRWQQGNVFSCSVMHEALHNHYTQKSLSLSPEGCPTNGPKIPSIATGMVGALLLLLVVALGIGLFMRRRHIVRKR

SEQ ID NO: 185 - protein, 252 aa, Artificial sequence
  Synthetic polypeptide
  misc_feature: IgG1FcDELTA16_TQ
TQVFLFPPKPKDTLMISRTPEVTCVVVDVSHEDPEVKFNWYVDGVEVHNAKTKPREEQYNSTYRVVSVLTVLHQDWLNGKEYKCKVSNKALPAPIEKTISKAKGQPREPQVYTLPPSRDELTKNQVSLTCLVKGFYPSDIAVEWESNGQPENNYKTTPPVLDSDGSFFLYSKLTVDKSRWQQGNVFSCSVMHEALHNHYTQKSLSLSPEGCPTNGPKIPSIATGMVGALLLLLVVALGIGLFMRRRHIVRKR

SEQ ID NO: 186 - protein, 252 aa, Artificial sequence
  Synthetic polypeptide
  misc_feature: IgG1FcDELTA16_AQ
AQVFLFPPKPKDTLMISRTPEVTCVVVDVSHEDPEVKFNWYVDGVEVHNAKTKPREEQYNSTYRVVSVLTVLHQDWLNGKEYKCKVSNKALPAPIEKTISKAKGQPREPQVYTLPPSRDELTKNQVSLTCLVKGFYPSDIAVEWESNGQPENNYKTTPPVLDSDGSFFLYSKLTVDKSRWQQGNVFSCSVMHEALHNHYTQKSLSLSPEGCPTNGPKIPSIATGMVGALLLLLVVALGIGLFMRRRHIVRKR

SEQ ID NO: 187 - protein, 252 aa, Artificial sequence
  Synthetic polypeptide
  misc_feature: IgG1FcDELTA16_GQ
GQVFLFPPKPKDTLMISRTPEVTCVVVDVSHEDPEVKFNWYVDGVEVHNAKTKPREEQYNSTYRVVSVLTVLHQDWLNGKEYKCKVSNKALPAPIEKTISKAKGQPREPQVYTLPPSRDELTKNQVSLTCLVKGFYPSDIAVEWESNGQPENNYKTTPPVLDSDGSFFLYSKLTVDKSRWQQGNVFSCSVMHEALHNHYTQKSLSLSPEGCPTNGPKIPSIATGMVGALLLLLVVALGIGLFMRRRHIVRKR

SEQ ID NO: 188 - protein, 470 aa, Artificial sequence
  Synthetic polypeptide
  misc_feature: Ritu-EETCWDW
MDWTWRILFLVAAATGAHSQVQLQQPGAELVKPGASVKMSCKASGYTFTSYNMHWVKQTPGRGLEWIGAIYPGNGDTSYNQKFKGKATLTADKSSSTAYMQLSSLTSEDSAVYYCARSTYYGGDWYFNVWGAGTTVTVSAASTKGPSVFPLAPSSKSTSGGTAALGCLVKDYFPEPVTVSWNSGALTSGVHTFPAVLQSSGLYSLSSVVTVPSSSLGTQTYICNVNHKPSNTKVDKKVEPKSCDKTHTCPPCPAPEETCWDWVFLFPPKPKDTLMISRTPEVTCVVVDVSHEDPEVKFNWYVDGVEVHNAKTKPREEQYNSTYRVVSVLTVLHQDWLNGKEYKCKVSNKALPAPIEKTISKAKGQPREPQVYTLPPSRDELTKNQVSLTCLVKGFYPSDIAVEWESNGQPENNYKTTPPVLDSDGSFFLYSKLTVDKSRWQQGNVFSCSVMHEALHNHYTQKSLSLSPGK

SEQ ID NO: 189 - protein, 470 aa, Artificial sequence
  Synthetic polypeptide
  misc_feature: Ritu-FETCWDW
MDWTWRILFLVAAATGAHSQVQLQQPGAELVKPGASVKMSCKASGYTFTSYNMHWVKQTPGRGLEWIGAIYPGNGDTSYNQKFKGKATLTADKSSSTAYMQLSSLTSEDSAVYYCARSTYYGGDWYFNVWGAGTTVTVSAASTKGPSVFPLAPSSKSTSGGTAALGCLVKDYFPEPVTVSWNSGALTSGVHTFPAVLQSSGLYSLSSVVTVPSSSLGTQTYICNVNHKPSNTKVDKKVEPKSCDKTHTCPPCPAPFETCWDWVFLFPPKPKDTLMISRTPEVTCVVVDVSHEDPEVKFNWYVDGVEVHNAKTKPREEQYNSTYRVVSVLTVLHQDWLNGKEYKCKVSNKALPAPIEKTISKAKGQPREPQVYTLPPSRDELTKNQVSLTCLVKGFYPSDIAVEWESNGQPENNYKTTPPVLDSDGSFFLYSKLTVDKSRWQQGNVFSCSVMHEALHNHYTQKSLSLSPGK

SEQ ID NO: 190 - protein, 470 aa, Artificial sequence
  Synthetic polypeptide
  misc_feature: Ritu-YETCWDW
MDWTWRILFLVAAATGAHSQVQLQQPGAELVKPGASVKMSCKASGYTFTSYNMHWVKQTPGRGLEWIGAIYPGNGDTSYNQKFKGKATLTADKSSSTAYMQLSSLTSEDSAVYYCARSTYYGGDWYFNVWGAGTTVTVSAASTKGPSVFPLAPSSKSTSGGTAALGCLVKDYFPEPVTVSWNSGALTSGVHTFPAVLQSSGLYSLSSVVTVPSSSLGTQTYICNVNHKPSNTKVDKKVEPKSCDKTHTCPPCPAPYETCWDWVFLFPPKPKDTLMISRTPEVTCVVVDVSHEDPEVKFNWYVDGVEVHNAKTKPREEQYNSTYRVVSVLTVLHQDWLNGKEYKCKVSNKALPAPIEKTISKAKGQPREPQVYTLPPSRDELTKNQVSLTCLVKGFYPSDIAVEWESNGQPENNYKTTPPVLDSDGSFFLYSKLTVDKSRWQQGNVFSCSVMHEALHNHYTQKSLSLSPGK

SEQ ID NO: 191 - protein, 470 aa, Artificial sequence
  Synthetic polypeptide
  misc_feature: Ritu-LETCWDW
MDWTWRILFLVAAATGAHSQVQLQQPGAELVKPGASVKMSCKASGYTFTSYNMHWVKQTPGRGLEWIGAIYPGNGDTSYNQKFKGKATLTADKSSSTAYMQLSSLTSEDSAVYYCARSTYYGGDWYFNVWGAGTTVTVSAASTKGPSVFPLAPSSKSTSGGTAALGCLVKDYFPEPVTVSWNSGALTSGVHTFPAVLQSSGLYSLSSVVTVPSSSLGTQTYICNVNHKPSNTKVDKKVEPKSCDKTHTCPPCPAPLETCWDWVFLFPPKPKDTLMISRTPEVTCVVVDVSHEDPEVKFNWYVDGVEVHNAKTKPREEQYNSTYRVVSVLTVLHQDWLNGKEYKCKVSNKALPAPIEKTISKAKGQPREPQVYTLPPSRDELTKNQVSLTCLVKGFYPSDIAVEWESNGQPENNYKTTPPVLDSDGSFFLYSKLTVDKSRWQQGNVFSCSVMHEALHNHYTQKSLSLSPGK

SEQ ID NO: 192 - protein, 470 aa, Artificial sequence
  Synthetic polypeptide
  misc_feature: Ritu-HETCWDW
MDWTWRILFLVAAATGAHSQVQLQQPGAELVKPGASVKMSCKASGYTFTSYNMHWVKQTPGRGLEWIGAIYPGNGDTSYNQKFKGKATLTADKSSSTAYMQLSSLTSEDSAVYYCARSTYYGGDWYFNVWGAGTTVTVSAASTKGPSVFPLAPSSKSTSGGTAALGCLVKDYFPEPVTVSWNSGALTSGVHTFPAVLQSSGLYSLSSVVTVPSSSLGTQTYICNVNHKPSNTKVDKKVEPKSCDKTHTCPPCPAPHETCWDWVFLFPPKPKDTLMISRTPEVTCVVVDVSHEDPEVKFNWYVDGVEVHNAKTKPREEQYNSTYRVVSVLTVLHQDWLNGKEYKCKVSNKALPAPIEKTISKAKGQPREPQVYTLPPSRDELTKNQVSLTCLVKGFYPSDIAVEWESNGQPENNYKTTPPVLDSDGSFFLYSKLTVDKSRWQQGNVFSCSVMHEALHNHYTQKSLSLSPGK

SEQ ID NO: 193 - protein, 470 aa, Artificial sequence
  Synthetic polypeptide
  misc_feature: Ritu-QETCWDW
MDWTWRILFLVAAATGAHSQVQLQQPGAELVKPGASVKMSCKASGYTFTSYNMHWVKQTPGRGLEWIGAIYPGNGDTSYNQKFKGKATLTADKSSSTAYMQLSSLTSEDSAVYYCARSTYYGGDWYFNVWGAGTTVTVSAASTKGPSVFPLAPSSKSTSGGTAALGCLVKDYFPEPVTVSWNSGALTSGVHTFPAVLQSSGLYSLSSVVTVPSSSLGTQTYICNVNHKPSNTKVDKKVEPKSCDKTHTCPPCPAPQETCWDWVFLFPPKPKDTLMISRTPEVTCVVVDVSHEDPEVKFNWYVDGVEVHNAKTKPREEQYNSTYRVVSVLTVLHQDWLNGKEYKCKVSNKALPAPIEKTISKAKGQPREPQVYTLPPSRDELTKNQVSLTCLVKGFYPSDIAVEWESNGQPENNYKTTPPVLDSDGSFFLYSKLTVDKSRWQQGNVFSCSVMHEALHNHYTQKSLSLSPGK

SEQ ID NO: 194 - protein, 470 aa, Artificial sequence
  Synthetic polypeptide
  misc_feature: Ritu-IETCWDW
MDWTWRILFLVAAATGAHSQVQLQQPGAELVKPGASVKMSCKASGYTFTSYNMHWVKQTPGRGLEWIGAIYPGNGDTSYNQKFKGKATLTADKSSSTAYMQLSSLTSEDSAVYYCARSTYYGGDWYFNVWGAGTTVTVSAASTKGPSVFPLAPSSKSTSGGTAALGCLVKDYFPEPVTVSWNSGALTSGVHTFPAVLQSSGLYSLSSVVTVPSSSLGTQTYICNVNHKPSNTKVDKKVEPKSCDKTHTCPPCPAPIETCWDWVFLFPPKPKDTLMISRTPEVTCVVVDVSHEDPEVKFNWYVDGVEVHNAKTKPREEQYNSTYRVVSVLTVLHQDWLNGKEYKCKVSNKALPAPIEKTISKAKGQPREPQVYTLPPSRDELTKNQVSLTCLVKGFYPSDIAVEWESNGQPENNYKTTPPVLDSDGSFFLYSKLTVDKSRWQQGNVFSCSVMHEALHNHYTQKSLSLSPGK

SEQ ID NO: 195 - protein, 470 aa, Artificial sequence
  Synthetic polypeptide
  misc_feature: Ritu-METCWDW
MDWTWRILFLVAAATGAHSQVQLQQPGAELVKPGASVKMSCKASGYTFTSYNMHWVKQTPGRGLEWIGAIYPGNGDTSYNQKFKGKATLTADKSSSTAYMQLSSLTSEDSAVYYCARSTYYGGDWYFNVWGAGTTVTVSAASTKGPSVFPLAPSSKSTSGGTAALGCLVKDYFPEPVTVSWNSGALTSGVHTFPAVLQSSGLYSLSSVVTVPSSSLGTQTYICNVNHKPSNTKVDKKVEPKSCDKTHTCPPCPAPMETCWDWVFLFPPKPKDTLMISRTPEVTCVVVDVSHEDPEVKFNWYVDGVEVHNAKTKPREEQYNSTYRVVSVLTVLHQDWLNGKEYKCKVSNKALPAPIEKTISKAKGQPREPQVYTLPPSRDELTKNQVSLTCLVKGFYPSDIAVEWESNGQPENNYKTTPPVLDSDGSFFLYSKLTVDKSRWQQGNVFSCSVMHEALHNHYTQKSLSLSPGK

SEQ ID NO: 196 - protein, 470 aa, Artificial sequence
  Synthetic polypeptide
  misc_feature: Ritu-NETCWDW
MDWTWRILFLVAAATGAHSQVQLQQPGAELVKPGASVKMSCKASGYTFTSYNMHWVKQTPGRGLEWIGAIYPGNGDTSYNQKFKGKATLTADKSSSTAYMQLSSLTSEDSAVYYCARSTYYGGDWYFNVWGAGTTVTVSAASTKGPSVFPLAPSSKSTSGGTAALGCLVKDYFPEPVTVSWNSGALTSGVHTFPAVLQSSGLYSLSSVVTVPSSSLGTQTYICNVNHKPSNTKVDKKVEPKSCDKTHTCPPCPAPNETCWDWVFLFPPKPKDTLMISRTPEVTCVVVDVSHEDPEVKFNWYVDGVEVHNAKTKPREEQYNSTYRVVSVLTVLHQDWLNGKEYKCKVSNKALPAPIEKTISKAKGQPREPQVYTLPPSRDELTKNQVSLTCLVKGFYPSDIAVEWESNGQPENNYKTTPPVLDSDGSFFLYSKLTVDKSRWQQGNVFSCSVMHEALHNHYTQKSLSLSPGK

SEQ ID NO: 197 - protein, 470 aa, Artificial sequence
  Synthetic polypeptide
  misc_feature: Ritu-KETCWDW
MDWTWRILFLVAAATGAHSQVQLQQPGAELVKPGASVKMSCKASGYTFTSYNMHWVKQTPGRGLEWIGAIYPGNGDTSYNQKFKGKATLTADKSSSTAYMQLSSLTSEDSAVYYCARSTYYGGDWYFNVWGAGTTVTVSAASTKGPSVFPLAPSSKSTSGGTAALGCLVKDYFPEPVTVSWNSGALTSGVHTFPAVLQSSGLYSLSSVVTVPSSSLGTQTYICNVNHKPSNTKVDKKVEPKSCDKTHTCPPCPAPKETCWDWVFLFPPKPKDTLMISRTPEVTCVVVDVSHEDPEVKFNWYVDGVEVHNAKTKPREEQYNSTYRVVSVLTVLHQDWLNGKEYKCKVSNKALPAPIEKTISKAKGQPREPQVYTLPPSRDELTKNQVSLTCLVKGFYPSDIAVEWESNGQPENNYKTTPPVLDSDGSFFLYSKLTVDKSRWQQGNVFSCSVMHEALHNHYTQKSLSLSPGK

SEQ ID NO: 198 - protein, 470 aa, Artificial sequence
  Synthetic polypeptide
  misc_feature: Ritu-VETCWDW
MDWTWRILFLVAAATGAHSQVQLQQPGAELVKPGASVKMSCKASGYTFTSYNMHWVKQTPGRGLEWIGAIYPGNGDTSYNQKFKGKATLTADKSSSTAYMQLSSLTSEDSAVYYCARSTYYGGDWYFNVWGAGTTVTVSAASTKGPSVFPLAPSSKSTSGGTAALGCLVKDYFPEPVTVSWNSGALTSGVHTFPAVLQSSGLYSLSSVVTVPSSSLGTQTYICNVNHKPSNTKVDKKVEPKSCDKTHTCPPCPAPVETCWDWVFLFPPKPKDTLMISRTPEVTCVVVDVSHEDPEVKFNWYVDGVEVHNAKTKPREEQYNSTYRVVSVLTVLHQDWLNGKEYKCKVSNKALPAPIEKTISKAKGQPREPQVYTLPPSRDELTKNQVSLTCLVKGFYPSDIAVEWESNGQPENNYKTTPPVLDSDGSFFLYSKLTVDKSRWQQGNVFSCSVMHEALHNHYTQKSLSLSPGK

SEQ ID NO: 199 - protein, 470 aa, Artificial sequence
  Synthetic polypeptide
  misc_feature: Ritu-DETCWDW
MDWTWRILFLVAAATGAHSQVQLQQPGAELVKPGASVKMSCKASGYTFTSYNMHWVKQTPGRGLEWIGAIYPGNGDTSYNQKFKGKATLTADKSSSTAYMQLSSLTSEDSAVYYCARSTYYGGDWYFNVWGAGTTVTVSAASTKGPSVFPLAPSSKSTSGGTAALGCLVKDYFPEPVTVSWNSGALTSGVHTFPAVLQSSGLYSLSSVVTVPSSSLGTQTYICNVNHKPSNTKVDKKVEPKSCDKTHTCPPCPAPDETCWDWVFLFPPKPKDTLMISRTPEVTCVVVDVSHEDPEVKFNWYVDGVEVHNAKTKPREEQYNSTYRVVSVLTVLHQDWLNGKEYKCKVSNKALPAPIEKTISKAKGQPREPQVYTLPPSRDELTKNQVSLTCLVKGFYPSDIAVEWESNGQPENNYKTTPPVLDSDGSFFLYSKLTVDKSRWQQGNVFSCSVMHEALHNHYTQKSLSLSPGK

SEQ ID NO: 200 - protein, 470 aa, Artificial sequence
  Synthetic polypeptide
  misc_feature: Ritu-SETCWDW
MDWTWRILFLVAAATGAHSQVQLQQPGAELVKPGASVKMSCKASGYTFTSYNMHWVKQTPGRGLEWIGAIYPGNGDTSYNQKFKGKATLTADKSSSTAYMQLSSLTSEDSAVYYCARSTYYGGDWYFNVWGAGTTVTVSAASTKGPSVFPLAPSSKSTSGGTAALGCLVKDYFPEPVTVSWNSGALTSGVHTFPAVLQSSGLYSLSSVVTVPSSSLGTQTYICNVNHKPSNTKVDKKVEPKSCDKTHTCPPCPAPSETCWDWVFLFPPKPKDTLMISRTPEVTCVVVDVSHEDPEVKFNWYVDGVEVHNAKTKPREEQYNSTYRVVSVLTVLHQDWLNGKEYKCKVSNKALPAPIEKTISKAKGQPREPQVYTLPPSRDELTKNQVSLTCLVKGFYPSDIAVEWESNGQPENNYKTTPPVLDSDGSFFLYSKLTVDKSRWQQGNVFSCSVMHEALHNHYTQKSLSLSPGK

SEQ ID NO: 201 - protein, 470 aa, Artificial sequence
  Synthetic polypeptide
  misc_feature: Ritu-CETCWDW
MDWTWRILFLVAAATGAHSQVQLQQPGAELVKPGASVKMSCKASGYTFTSYNMHWVKQTPGRGLEWIGAIYPGNGDTSYNQKFKGKATLTADKSSSTAYMQLSSLTSEDSAVYYCARSTYYGGDWYFNVWGAGTTVTVSAASTKGPSVFPLAPSSKSTSGGTAALGCLVKDYFPEPVTVSWNSGALTSGVHTFPAVLQSSGLYSLSSVVTVPSSSLGTQTYICNVNHKPSNTKVDKKVEPKSCDKTHTCPPCPAPCETCWDWVFLFPPKPKDTLMISRTPEVTCVVVDVSHEDPEVKFNWYVDGVEVHNAKTKPREEQYNSTYRVVSVLTVLHQDWLNGKEYKCKVSNKALPAPIEKTISKAKGQPREPQVYTLPPSRDELTKNQVSLTCLVKGFYPSDIAVEWESNGQPENNYKTTPPVLDSDGSFFLYSKLTVDKSRWQQGNVFSCSVMHEALHNHYTQKSLSLSPGK

SEQ ID NO: 202 - protein, 470 aa, Artificial sequence
  Synthetic polypeptide
  misc_feature: Ritu-WETCWDW
MDWTWRILFLVAAATGAHSQVQLQQPGAELVKPGASVKMSCKASGYTFTSYNMHWVKQTPGRGLEWIGAIYPGNGDTSYNQKFKGKATLTADKSSSTAYMQLSSLTSEDSAVYYCARSTYYGGDWYFNVWGAGTTVTVSAASTKGPSVFPLAPSSKSTSGGTAALGCLVKDYFPEPVTVSWNSGALTSGVHTFPAVLQSSGLYSLSSVVTVPSSSLGTQTYICNVNHKPSNTKVDKKVEPKSCDKTHTCPPCPAPWETCWDWVFLFPPKPKDTLMISRTPEVTCVVVDVSHEDPEVKFNWYVDGVEVHNAKTKPREEQYNSTYRVVSVLTVLHQDWLNGKEYKCKVSNKALPAPIEKTISKAKGQPREPQVYTLPPSRDELTKNQVSLTCLVKGFYPSDIAVEWESNGQPENNYKTTPPVLDSDGSFFLYSKLTVDKSRWQQGNVFSCSVMHEALHNHYTQKSLSLSPGK

SEQ ID NO: 203 - protein, 470 aa, Artificial sequence
  Synthetic polypeptide
  misc_feature: Ritu-PETCWDW
MDWTWRILFLVAAATGAHSQVQLQQPGAELVKPGASVKMSCKASGYTFTSYNMHWVKQTPGRGLEWIGAIYPGNGDTSYNQKFKGKATLTADKSSSTAYMQLSSLTSEDSAVYYCARSTYYGGDWYFNVWGAGTTVTVSAASTKGPSVFPLAPSSKSTSGGTAALGCLVKDYFPEPVTVSWNSGALTSGVHTFPAVLQSSGLYSLSSVVTVPSSSLGTQTYICNVNHKPSNTKVDKKVEPKSCDKTHTCPPCPAPPETCWDWVFLFPPKPKDTLMISRTPEVTCVVVDVSHEDPEVKFNWYVDGVEVHNAKTKPREEQYNSTYRVVSVLTVLHQDWLNGKEYKCKVSNKALPAPIEKTISKAKGQPREPQVYTLPPSRDELTKNQVSLTCLVKGFYPSDIAVEWESNGQPENNYKTTPPVLDSDGSFFLYSKLTVDKSRWQQGNVFSCSVMHEALHNHYTQKSLSLSPGK

SEQ ID NO: 204 - protein, 470 aa, Artificial sequence
  Synthetic polypeptide
  misc_feature: Ritu-RETCWDW
MDWTWRILFLVAAATGAHSQVQLQQPGAELVKPGASVKMSCKASGYTFTSYNMHWVKQTPGRGLEWIGAIYPGNGDTSYNQKFKGKATLTADKSSSTAYMQLSSLTSEDSAVYYCARSTYYGGDWYFNVWGAGTTVTVSAASTKGPSVFPLAPSSKSTSGGTAALGCLVKDYFPEPVTVSWNSGALTSGVHTFPAVLQSSGLYSLSSVVTVPSSSLGTQTYICNVNHKPSNTKVDKKVEPKSCDKTHTCPPCPAPRETCWDWVFLFPPKPKDTLMISRTPEVTCVVVDVSHEDPEVKFNWYVDGVEVHNAKTKPREEQYNSTYRVVSVLTVLHQDWLNGKEYKCKVSNKALPAPIEKTISKAKGQPREPQVYTLPPSRDELTKNQVSLTCLVKGFYPSDIAVEWESNGQPENNYKTTPPVLDSDGSFFLYSKLTVDKSRWQQGNVFSCSVMHEALHNHYTQKSLSLSPGK

SEQ ID NO: 205 - protein, 470 aa, Artificial sequence
  Synthetic polypeptide
  misc_feature: Ritu-TETCWDW
MDWTWRILFLVAAATGAHSQVQLQQPGAELVKPGASVKMSCKASGYTFTSYNMHWVKQTPGRGLEWIGAIYPGNGDTSYNQKFKGKATLTADKSSSTAYMQLSSLTSEDSAVYYCARSTYYGGDWYFNVWGAGTTVTVSAASTKGPSVFPLAPSSKSTSGGTAALGCLVKDYFPEPVTVSWNSGALTSGVHTFPAVLQSSGLYSLSSVVTVPSSSLGTQTYICNVNHKPSNTKVDKKVEPKSCDKTHTCPPCPAPTETCWDWVFLFPPKPKDTLMISRTPEVTCVVVDVSHEDPEVKFNWYVDGVEVHNAKTKPREEQYNSTYRVVSVLTVLHQDWLNGKEYKCKVSNKALPAPIEKTISKAKGQPREPQVYTLPPSRDELTKNQVSLTCLVKGFYPSDIAVEWESNGQPENNYKTTPPVLDSDGSFFLYSKLTVDKSRWQQGNVFSCSVMHEALHNHYTQKSLSLSPGK

SEQ ID NO: 206 - protein, 470 aa, Artificial sequence
  Synthetic polypeptide
  misc_feature: Ritu-AETCWDW
MDWTWRILFLVAAATGAHSQVQLQQPGAELVKPGASVKMSCKASGYTFTSYNMHWVKQTPGRGLEWIGAIYPGNGDTSYNQKFKGKATLTADKSSSTAYMQLSSLTSEDSAVYYCARSTYYGGDWYFNVWGAGTTVTVSAASTKGPSVFPLAPSSKSTSGGTAALGCLVKDYFPEPVTVSWNSGALTSGVHTFPAVLQSSGLYSLSSVVTVPSSSLGTQTYICNVNHKPSNTKVDKKVEPKSCDKTHTCPPCPAPAETCWDWVFLFPPKPKDTLMISRTPEVTCVVVDVSHEDPEVKFNWYVDGVEVHNAKTKPREEQYNSTYRVVSVLTVLHQDWLNGKEYKCKVSNKALPAPIEKTISKAKGQPREPQVYTLPPSRDELTKNQVSLTCLVKGFYPSDIAVEWESNGQPENNYKTTPPVLDSDGSFFLYSKLTVDKSRWQQGNVFSCSVMHEALHNHYTQKSLSLSPGK

SEQ ID NO: 207 - protein, 470 aa, Artificial sequence
  Synthetic polypeptide
  misc_feature: Ritu-GETCWDW
MDWTWRILFLVAAATGAHSQVQLQQPGAELVKPGASVKMSCKASGYTFTSYNMHWVKQTPGRGLEWIGAIYPGNGDTSYNQKFKGKATLTADKSSSTAYMQLSSLTSEDSAVYYCARSTYYGGDWYFNVWGAGTTVTVSAASTKGPSVFPLAPSSKSTSGGTAALGCLVKDYFPEPVTVSWNSGALTSGVHTFPAVLQSSGLYSLSSVVTVPSSSLGTQTYICNVNHKPSNTKVDKKVEPKSCDKTHTCPPCPAPGETCWDWVFLFPPKPKDTLMISRTPEVTCVVVDVSHEDPEVKFNWYVDGVEVHNAKTKPREEQYNSTYRVVSVLTVLHQDWLNGKEYKCKVSNKALPAPIEKTISKAKGQPREPQVYTLPPSRDELTKNQVSLTCLVKGFYPSDIAVEWESNGQPENNYKTTPPVLDSDGSFFLYSKLTVDKSRWQQGNVFSCSVMHEALHNHYTQKSLSLSPGK

SEQ ID NO: 208 - protein, 470 aa, Artificial sequence
  Synthetic polypeptide
  misc_feature: Ritu-EFTCWDW
MDWTWRILFLVAAATGAHSQVQLQQPGAELVKPGASVKMSCKASGYTFTSYNMHWVKQTPGRGLEWIGAIYPGNGDTSYNQKFKGKATLTADKSSSTAYMQLSSLTSEDSAVYYCARSTYYGGDWYFNVWGAGTTVTVSAASTKGPSVFPLAPSSKSTSGGTAALGCLVKDYFPEPVTVSWNSGALTSGVHTFPAVLQSSGLYSLSSVVTVPSSSLGTQTYICNVNHKPSNTKVDKKVEPKSCDKTHTCPPCPAPEFTCWDWVFLFPPKPKDTLMISRTPEVTCVVVDVSHEDPEVKFNWYVDGVEVHNAKTKPREEQYNSTYRVVSVLTVLHQDWLNGKEYKCKVSNKALPAPIEKTISKAKGQPREPQVYTLPPSRDELTKNQVSLTCLVKGFYPSDIAVEWESNGQPENNYKTTPPVLDSDGSFFLYSKLTVDKSRWQQGNVFSCSVMHEALHNHYTQKSLSLSPGK

SEQ ID NO: 209 - protein, 470 aa, Artificial sequence
  Synthetic polypeptide
  misc_feature: Ritu-EYTCWDW
MDWTWRILFLVAAATGAHSQVQLQQPGAELVKPGASVKMSCKASGYTFTSYNMHWVKQTPGRGLEWIGAIYPGNGDTSYNQKFKGKATLTADKSSSTAYMQLSSLTSEDSAVYYCARSTYYGGDWYFNVWGAGTTVTVSAASTKGPSVFPLAPSSKSTSGGTAALGCLVKDYFPEPVTVSWNSGALTSGVHTFPAVLQSSGLYSLSSVVTVPSSSLGTQTYICNVNHKPSNTKVDKKVEPKSCDKTHTCPPCPAPEYTCWDWVFLFPPKPKDTLMISRTPEVTCVVVDVSHEDPEVKFNWYVDGVEVHNAKTKPREEQYNSTYRVVSVLTVLHQDWLNGKEYKCKVSNKALPAPIEKTISKAKGQPREPQVYTLPPSRDELTKNQVSLTCLVKGFYPSDIAVEWESNGQPENNYKTTPPVLDSDGSFFLYSKLTVDKSRWQQGNVFSCSVMHEALHNHYTQKSLSLSPGK

SEQ ID NO: 210 - protein, 470 aa, Artificial sequence
  Synthetic polypeptide
  misc_feature: Ritu-ELTCWDW
MDWTWRILFLVAAATGAHSQVQLQQPGAELVKPGASVKMSCKASGYTFTSYNMHWVKQTPGRGLEWIGAIYPGNGDTSYNQKFKGKATLTADKSSSTAYMQLSSLTSEDSAVYYCARSTYYGGDWYFNVWGAGTTVTVSAASTKGPSVFPLAPSSKSTSGGTAALGCLVKDYFPEPVTVSWNSGALTSGVHTFPAVLQSSGLYSLSSVVTVPSSSLGTQTYICNVNHKPSNTKVDKKVEPKSCDKTHTCPPCPAPELTCWDWVFLFPPKPKDTLMISRTPEVTCVVVDVSHEDPEVKFNWYVDGVEVHNAKTKPREEQYNSTYRVVSVLTVLHQDWLNGKEYKCKVSNKALPAPIEKTISKAKGQPREPQVYTLPPSRDELTKNQVSLTCLVKGFYPSDIAVEWESNGQPENNYKTTPPVLDSDGSFFLYSKLTVDKSRWQQGNVFSCSVMHEALHNHYTQKSLSLSPGK

SEQ ID NO: 211 - protein, 470 aa, Artificial sequence
  Synthetic polypeptide
  misc_feature: Ritu-EHTCWDW
MDWTWRILFLVAAATGAHSQVQLQQPGAELVKPGASVKMSCKASGYTFTSYNMHWVKQTPGRGLEWIGAIYPGNGDTSYNQKFKGKATLTADKSSSTAYMQLSSLTSEDSAVYYCARSTYYGGDWYFNVWGAGTTVTVSAASTKGPSVFPLAPSSKSTSGGTAALGCLVKDYFPEPVTVSWNSGALTSGVHTFPAVLQSSGLYSLSSVVTVPSSSLGTQTYICNVNHKPSNTKVDKKVEPKSCDKTHTCPPCPAPEHTCWDWVFLFPPKPKDTLMISRTPEVTCVVVDVSHEDPEVKFNWYVDGVEVHNAKTKPREEQYNSTYRVVSVLTVLHQDWLNGKEYKCKVSNKALPAPIEKTISKAKGQPREPQVYTLPPSRDELTKNQVSLTCLVKGFYPSDIAVEWESNGQPENNYKTTPPVLDSDGSFFLYSKLTVDKSRWQQGNVFSCSVMHEALHNHYTQKSLSLSPGK

SEQ ID NO: 212 - protein, 470 aa, Artificial sequence
  Synthetic polypeptide
  misc_feature: Ritu-EQTCWDW
MDWTWRILFLVAAATGAHSQVQLQQPGAELVKPGASVKMSCKASGYTFTSYNMHWVKQTPGRGLEWIGAIYPGNGDTSYNQKFKGKATLTADKSSSTAYMQLSSLTSEDSAVYYCARSTYYGGDWYFNVWGAGTTVTVSAASTKGPSVFPLAPSSKSTSGGTAALGCLVKDYFPEPVTVSWNSGALTSGVHTFPAVLQSSGLYSLSSVVTVPSSSLGTQTYICNVNHKPSNTKVDKKVEPKSCDKTHTCPPCPAPEQTCWDWVFLFPPKPKDTLMISRTPEVTCVVVDVSHEDPEVKFNWYVDGVEVHNAKTKPREEQYNSTYRVVSVLTVLHQDWLNGKEYKCKVSNKALPAPIEKTISKAKGQPREPQVYTLPPSRDELTKNQVSLTCLVKGFYPSDIAVEWESNGQPENNYKTTPPVLDSDGSFFLYSKLTVDKSRWQQGNVFSCSVMHEALHNHYTQKSLSLSPGK

SEQ ID NO: 213 - protein, 470 aa, Artificial sequence
  Synthetic polypeptide
  misc_feature: Ritu-EITCWDW
MDWTWRILFLVAAATGAHSQVQLQQPGAELVKPGASVKMSCKASGYTFTSYNMHWVKQTPGRGLEWIGAIYPGNGDTSYNQKFKGKATLTADKSSSTAYMQLSSLTSEDSAVYYCARSTYYGGDWYFNVWGAGTTVTVSAASTKGPSVFPLAPSSKSTSGGTAALGCLVKDYFPEPVTVSWNSGALTSGVHTFPAVLQSSGLYSLSSVVTVPSSSLGTQTYICNVNHKPSNTKVDKKVEPKSCDKTHTCPPCPAPEITCWDWVFLFPPKPKDTLMISRTPEVTCVVVDVSHEDPEVKFNWYVDGVEVHNAKTKPREEQYNSTYRVVSVLTVLHQDWLNGKEYKCKVSNKALPAPIEKTISKAKGQPREPQVYTLPPSRDELTKNQVSLTCLVKGFYPSDIAVEWESNGQPENNYKTTPPVLDSDGSFFLYSKLTVDKSRWQQGNVFSCSVMHEALHNHYTQKSLSLSPGK

SEQ ID NO: 214 - protein, 470 aa, Artificial sequence
  Synthetic polypeptide
  misc_feature: Ritu-EMTCWDW
MDWTWRILFLVAAATGAHSQVQLQQPGAELVKPGASVKMSCKASGYTFTSYNMHWVKQTPGRGLEWIGAIYPGNGDTSYNQKFKGKATLTADKSSSTAYMQLSSLTSEDSAVYYCARSTYYGGDWYFNVWGAGTTVTVSAASTKGPSVFPLAPSSKSTSGGTAALGCLVKDYFPEPVTVSWNSGALTSGVHTFPAVLQSSGLYSLSSVVTVPSSSLGTQTYICNVNHKPSNTKVDKKVEPKSCDKTHTCPPCPAPEMTCWDWVFLFPPKPKDTLMISRTPEVTCVVVDVSHEDPEVKFNWYVDGVEVHNAKTKPREEQYNSTYRVVSVLTVLHQDWLNGKEYKCKVSNKALPAPIEKTISKAKGQPREPQVYTLPPSRDELTKNQVSLTCLVKGFYPSDIAVEWESNGQPENNYKTTPPVLDSDGSFFLYSKLTVDKSRWQQGNVFSCSVMHEALHNHYTQKSLSLSPGK

SEQ ID NO: 215 - protein, 470 aa, Artificial sequence
  Synthetic polypeptide
  misc_feature: Ritu-ENTCWDW
MDWTWRILFLVAAATGAHSQVQLQQPGAELVKPGASVKMSCKASGYTFTSYNMHWVKQTPGRGLEWIGAIYPGNGDTSYNQKFKGKATLTADKSSSTAYMQLSSLTSEDSAVYYCARSTYYGGDWYFNVWGAGTTVTVSAASTKGPSVFPLAPSSKSTSGGTAALGCLVKDYFPEPVTVSWNSGALTSGVHTFPAVLQSSGLYSLSSVVTVPSSSLGTQTYICNVNHKPSNTKVDKKVEPKSCDKTHTCPPCPAPENTCWDWVFLFPPKPKDTLMISRTPEVTCVVVDVSHEDPEVKFNWYVDGVEVHNAKTKPREEQYNSTYRVVSVLTVLHQDWLNGKEYKCKVSNKALPAPIEKTISKAKGQPREPQVYTLPPSRDELTKNQVSLTCLVKGFYPSDIAVEWESNGQPENNYKTTPPVLDSDGSFFLYSKLTVDKSRWQQGNVFSCSVMHEALHNHYTQKSLSLSPGK

SEQ ID NO: 216 - protein, 470 aa, Artificial sequence
  Synthetic polypeptide
  misc_feature: Ritu-EKTCWDW
MDWTWRILFLVAAATGAHSQVQLQQPGAELVKPGASVKMSCKASGYTFTSYNMHWVKQTPGRGLEWIGAIYPGNGDTSYNQKFKGKATLTADKSSSTAYMQLSSLTSEDSAVYYCARSTYYGGDWYFNVWGAGTTVTVSAASTKGPSVFPLAPSSKSTSGGTAALGCLVKDYFPEPVTVSWNSGALTSGVHTFPAVLQSSGLYSLSSVVTVPSSSLGTQTYICNVNHKPSNTKVDKKVEPKSCDKTHTCPPCPAPEKTCWDWVFLFPPKPKDTLMISRTPEVTCVVVDVSHEDPEVKFNWYVDGVEVHNAKTKPREEQYNSTYRVVSVLTVLHQDWLNGKEYKCKVSNKALPAPIEKTISKAKGQPREPQVYTLPPSRDELTKNQVSLTCLVKGFYPSDIAVEWESNGQPENNYKTTPPVLDSDGSFFLYSKLTVDKSRWQQGNVFSCSVMHEALHNHYTQKSLSLSPGK

SEQ ID NO: 217 - protein, 470 aa, Artificial sequence
  Synthetic polypeptide
  misc_feature: Ritu-EVTCWDW
MDWTWRILFLVAAATGAHSQVQLQQPGAELVKPGASVKMSCKASGYTFTSYNMHWVKQTPGRGLEWIGAIYPGNGDTSYNQKFKGKATLTADKSSSTAYMQLSSLTSEDSAVYYCARSTYYGGDWYFNVWGAGTTVTVSAASTKGPSVFPLAPSSKSTSGGTAALGCLVKDYFPEPVTVSWNSGALTSGVHTFPAVLQSSGLYSLSSVVTVPSSSLGTQTYICNVNHKPSNTKVDKKVEPKSCDKTHTCPPCPAPEVTCWDWVFLFPPKPKDTLMISRTPEVTCVVVDVSHEDPEVKFNWYVDGVEVHNAKTKPREEQYNSTYRVVSVLTVLHQDWLNGKEYKCKVSNKALPAPIEKTISKAKGQPREPQVYTLPPSRDELTKNQVSLTCLVKGFYPSDIAVEWESNGQPENNYKTTPPVLDSDGSFFLYSKLTVDKSRWQQGNVFSCSVMHEALHNHYTQKSLSLSPGK

SEQ ID NO: 218 - protein, 470 aa, Artificial sequence
  Synthetic polypeptide
  misc_feature: Ritu-EDTCWDW
MDWTWRILFLVAAATGAHSQVQLQQPGAELVKPGASVKMSCKASGYTFTSYNMHWVKQTPGRGLEWIGAIYPGNGDTSYNQKFKGKATLTADKSSSTAYMQLSSLTSEDSAVYYCARSTYYGGDWYFNVWGAGTTVTVSAASTKGPSVFPLAPSSKSTSGGTAALGCLVKDYFPEPVTVSWNSGALTSGVHTFPAVLQSSGLYSLSSVVTVPSSSLGTQTYICNVNHKPSNTKVDKKVEPKSCDKTHTCPPCPAPEDTCWDWVFLFPPKPKDTLMISRTPEVTCVVVDVSHEDPEVKFNWYVDGVEVHNAKTKPREEQYNSTYRVVSVLTVLHQDWLNGKEYKCKVSNKALPAPIEKTISKAKGQPREPQVYTLPPSRDELTKNQVSLTCLVKGFYPSDIAVEWESNGQPENNYKTTPPVLDSDGSFFLYSKLTVDKSRWQQGNVFSCSVMHEALHNHYTQKSLSLSPGK

SEQ ID NO: 219 - protein, 470 aa, Artificial sequence
  Synthetic polypeptide
  misc_feature: Ritu-ESTCWDW
MDWTWRILFLVAAATGAHSQVQLQQPGAELVKPGASVKMSCKASGYTFTSYNMHWVKQTPGRGLEWIGAIYPGNGDTSYNQKFKGKATLTADKSSSTAYMQLSSLTSEDSAVYYCARSTYYGGDWYFNVWGAGTTVTVSAASTKGPSVFPLAPSSKSTSGGTAALGCLVKDYFPEPVTVSWNSGALTSGVHTFPAVLQSSGLYSLSSVVTVPSSSLGTQTYICNVNHKPSNTKVDKKVEPKSCDKTHTCPPCPAPESTCWDWVFLFPPKPKDTLMISRTPEVTCVVVDVSHEDPEVKFNWYVDGVEVHNAKTKPREEQYNSTYRVVSVLTVLHQDWLNGKEYKCKVSNKALPAPIEKTISKAKGQPREPQVYTLPPSRDELTKNQVSLTCLVKGFYPSDIAVEWESNGQPENNYKTTPPVLDSDGSFFLYSKLTVDKSRWQQGNVFSCSVMHEALHNHYTQKSLSLSPGK

SEQ ID NO: 220 - protein, 470 aa, Artificial sequence
  Synthetic polypeptide
  misc_feature: Ritu-ECTCWDW
MDWTWRILFLVAAATGAHSQVQLQQPGAELVKPGASVKMSCKASGYTFTSYNMHWVKQTPGRGLEWIGAIYPGNGDTSYNQKFKGKATLTADKSSSTAYMQLSSLTSEDSAVYYCARSTYYGGDWYFNVWGAGTTVTVSAASTKGPSVFPLAPSSKSTSGGTAALGCLVKDYFPEPVTVSWNSGALTSGVHTFPAVLQSSGLYSLSSVVTVPSSSLGTQTYICNVNHKPSNTKVDKKVEPKSCDKTHTCPPCPAPECTCWDWVFLFPPKPKDTLMISRTPEVTCVVVDVSHEDPEVKFNWYVDGVEVHNAKTKPREEQYNSTYRVVSVLTVLHQDWLNGKEYKCKVSNKALPAPIEKTISKAKGQPREPQVYTLPPSRDELTKNQVSLTCLVKGFYPSDIAVEWESNGQPENNYKTTPPVLDSDGSFFLYSKLTVDKSRWQQGNVFSCSVMHEALHNHYTQKSLSLSPGK

SEQ ID NO: 221 - protein, 470 aa, Artificial sequence
  Synthetic polypeptide
  misc_feature: Ritu-EWTCWDW
MDWTWRILFLVAAATGAHSQVQLQQPGAELVKPGASVKMSCKASGYTFTSYNMHWVKQTPGRGLEWIGAIYPGNGDTSYNQKFKGKATLTADKSSSTAYMQLSSLTSEDSAVYYCARSTYYGGDWYFNVWGAGTTVTVSAASTKGPSVFPLAPSSKSTSGGTAALGCLVKDYFPEPVTVSWNSGALTSGVHTFPAVLQSSGLYSLSSVVTVPSSSLGTQTYICNVNHKPSNTKVDKKVEPKSCDKTHTCPPCPAPEWTCWDWVFLFPPKPKDTLMISRTPEVTCVVVDVSHEDPEVKFNWYVDGVEVHNAKTKPREEQYNSTYRVVSVLTVLHQDWLNGKEYKCKVSNKALPAPIEKTISKAKGQPREPQVYTLPPSRDELTKNQVSLTCLVKGFYPSDIAVEWESNGQPENNYKTTPPVLDSDGSFFLYSKLTVDKSRWQQGNVFSCSVMHEALHNHYTQKSLSLSPGK

SEQ ID NO: 222 - protein, 470 aa, Artificial sequence
  Synthetic polypeptide
  misc_feature: Ritu-EPTCWDW
MDWTWRILFLVAAATGAHSQVQLQQPGAELVKPGASVKMSCKASGYTFTSYNMHWVKQTPGRGLEWIGAIYPGNGDTSYNQKFKGKATLTADKSSSTAYMQLSSLTSEDSAVYYCARSTYYGGDWYFNVWGAGTTVTVSAASTKGPSVFPLAPSSKSTSGGTAALGCLVKDYFPEPVTVSWNSGALTSGVHTFPAVLQSSGLYSLSSVVTVPSSSLGTQTYICNVNHKPSNTKVDKKVEPKSCDKTHTCPPCPAPEPTCWDWVFLFPPKPKDTLMISRTPEVTCVVVDVSHEDPEVKFNWYVDGVEVHNAKTKPREEQYNSTYRVVSVLTVLHQDWLNGKEYKCKVSNKALPAPIEKTISKAKGQPREPQVYTLPPSRDELTKNQVSLTCLVKGFYPSDIAVEWESNGQPENNYKTTPPVLDSDGSFFLYSKLTVDKSRWQQGNVFSCSVMHEALHNHYTQKSLSLSPGK

SEQ ID NO: 223 - protein, 470 aa, Artificial sequence
  Synthetic polypeptide
  misc_feature: Ritu-ERTCWDW
MDWTWRILFLVAAATGAHSQVQLQQPGAELVKPGASVKMSCKASGYTFTSYNMHWVKQTPGRGLEWIGAIYPGNGDTSYNQKFKGKATLTADKSSSTAYMQLSSLTSEDSAVYYCARSTYYGGDWYFNVWGAGTTVTVSAASTKGPSVFPLAPSSKSTSGGTAALGCLVKDYFPEPVTVSWNSGALTSGVHTFPAVLQSSGLYSLSSVVTVPSSSLGTQTYICNVNHKPSNTKVDKKVEPKSCDKTHTCPPCPAPERTCWDWVFLFPPKPKDTLMISRTPEVTCVVVDVSHEDPEVKFNWYVDGVEVHNAKTKPREEQYNSTYRVVSVLTVLHQDWLNGKEYKCKVSNKALPAPIEKTISKAKGQPREPQVYTLPPSRDELTKNQVSLTCLVKGFYPSDIAVEWESNGQPENNYKTTPPVLDSDGSFFLYSKLTVDKSRWQQGNVFSCSVMHEALHNHYTQKSLSLSPGK

SEQ ID NO: 224 - protein, 470 aa, Artificial sequence
  Synthetic polypeptide
  misc_feature: Ritu-ETTCWDW
MDWTWRILFLVAAATGAHSQVQLQQPGAELVKPGASVKMSCKASGYTFTSYNMHWVKQTPGRGLEWIGAIYPGNGDTSYNQKFKGKATLTADKSSSTAYMQLSSLTSEDSAVYYCARSTYYGGDWYFNVWGAGTTVTVSAASTKGPSVFPLAPSSKSTSGGTAALGCLVKDYFPEPVTVSWNSGALTSGVHTFPAVLQSSGLYSLSSVVTVPSSSLGTQTYICNVNHKPSNTKVDKKVEPKSCDKTHTCPPCPAPETTCWDWVFLFPPKPKDTLMISRTPEVTCVVVDVSHEDPEVKFNWYVDGVEVHNAKTKPREEQYNSTYRVVSVLTVLHQDWLNGKEYKCKVSNKALPAPIEKTISKAKGQPREPQVYTLPPSRDELTKNQVSLTCLVKGFYPSDIAVEWESNGQPENNYKTTPPVLDSDGSFFLYSKLTVDKSRWQQGNVFSCSVMHEALHNHYTQKSLSLSPGK

SEQ ID NO: 225 - protein, 470 aa, Artificial sequence
  Synthetic polypeptide
  misc_feature: Ritu-EATCWDW
MDWTWRILFLVAAATGAHSQVQLQQPGAELVKPGASVKMSCKASGYTFTSYNMHWVKQTPGRGLEWIGAIYPGNGDTSYNQKFKGKATLTADKSSSTAYMQLSSLTSEDSAVYYCARSTYYGGDWYFNVWGAGTTVTVSAASTKGPSVFPLAPSSKSTSGGTAALGCLVKDYFPEPVTVSWNSGALTSGVHTFPAVLQSSGLYSLSSVVTVPSSSLGTQTYICNVNHKPSNTKVDKKVEPKSCDKTHTCPPCPAPEATCWDWVFLFPPKPKDTLMISRTPEVTCVVVDVSHEDPEVKFNWYVDGVEVHNAKTKPREEQYNSTYRVVSVLTVLHQDWLNGKEYKCKVSNKALPAPIEKTISKAKGQPREPQVYTLPPSRDELTKNQVSLTCLVKGFYPSDIAVEWESNGQPENNYKTTPPVLDSDGSFFLYSKLTVDKSRWQQGNVFSCSVMHEALHNHYTQKSLSLSPGK

SEQ ID NO: 226 - protein, 470 aa, Artificial sequence
  Synthetic polypeptide
  misc_feature: Ritu-EGTCWDW
MDWTWRILFLVAAATGAHSQVQLQQPGAELVKPGASVKMSCKASGYTFTSYNMHWVKQTPGRGLEWIGAIYPGNGDTSYNQKFKGKATLTADKSSSTAYMQLSSLTSEDSAVYYCARSTYYGGDWYFNVWGAGTTVTVSAASTKGPSVFPLAPSSKSTSGGTAALGCLVKDYFPEPVTVSWNSGALTSGVHTFPAVLQSSGLYSLSSVVTVPSSSLGTQTYICNVNHKPSNTKVDKKVEPKSCDKTHTCPPCPAPEGTCWDWVFLFPPKPKDTLMISRTPEVTCVVVDVSHEDPEVKFNWYVDGVEVHNAKTKPREEQYNSTYRVVSVLTVLHQDWLNGKEYKCKVSNKALPAPIEKTISKAKGQPREPQVYTLPPSRDELTKNQVSLTCLVKGFYPSDIAVEWESNGQPENNYKTTPPVLDSDGSFFLYSKLTVDKSRWQQGNVFSCSVMHEALHNHYTQKSLSLSPGK

SEQ ID NO: 227 - protein, 470 aa, Artificial sequence
  Synthetic polypeptide
  misc_feature: Ritu-EEFCWDW
MDWTWRILFLVAAATGAHSQVQLQQPGAELVKPGASVKMSCKASGYTFTSYNMHWVKQTPGRGLEWIGAIYPGNGDTSYNQKFKGKATLTADKSSSTAYMQLSSLTSEDSAVYYCARSTYYGGDWYFNVWGAGTTVTVSAASTKGPSVFPLAPSSKSTSGGTAALGCLVKDYFPEPVTVSWNSGALTSGVHTFPAVLQSSGLYSLSSVVTVPSSSLGTQTYICNVNHKPSNTKVDKKVEPKSCDKTHTCPPCPAPEEFCWDWVFLFPPKPKDTLMISRTPEVTCVVVDVSHEDPEVKFNWYVDGVEVHNAKTKPREEQYNSTYRVVSVLTVLHQDWLNGKEYKCKVSNKALPAPIEKTISKAKGQPREPQVYTLPPSRDELTKNQVSLTCLVKGFYPSDIAVEWESNGQPENNYKTTPPVLDSDGSFFLYSKLTVDKSRWQQGNVFSCSVMHEALHNHYTQKSLSLSPGK

SEQ ID NO: 228 - protein, 470 aa, Artificial sequence
  Synthetic polypeptide
  misc_feature: Ritu-EEYCWDW
MDWTWRILFLVAAATGAHSQVQLQQPGAELVKPGASVKMSCKASGYTFTSYNMHWVKQTPGRGLEWIGAIYPGNGDTSYNQKFKGKATLTADKSSSTAYMQLSSLTSEDSAVYYCARSTYYGGDWYFNVWGAGTTVTVSAASTKGPSVFPLAPSSKSTSGGTAALGCLVKDYFPEPVTVSWNSGALTSGVHTFPAVLQSSGLYSLSSVVTVPSSSLGTQTYICNVNHKPSNTKVDKKVEPKSCDKTHTCPPCPAPEEYCWDWVFLFPPKPKDTLMISRTPEVTCVVVDVSHEDPEVKFNWYVDGVEVHNAKTKPREEQYNSTYRVVSVLTVLHQDWLNGKEYKCKVSNKALPAPIEKTISKAKGQPREPQVYTLPPSRDELTKNQVSLTCLVKGFYPSDIAVEWESNGQPENNYKTTPPVLDSDGSFFLYSKLTVDKSRWQQGNVFSCSVMHEALHNHYTQKSLSLSPGK

SEQ ID NO: 229 - protein, 470 aa, Artificial sequence
  Synthetic polypeptide
  misc_feature: Ritu-EELCWDW
MDWTWRILFLVAAATGAHSQVQLQQPGAELVKPGASVKMSCKASGYTFTSYNMHWVKQTPGRGLEWIGAIYPGNGDTSYNQKFKGKATLTADKSSSTAYMQLSSLTSEDSAVYYCARSTYYGGDWYFNVWGAGTTVTVSAASTKGPSVFPLAPSSKSTSGGTAALGCLVKDYFPEPVTVSWNSGALTSGVHTFPAVLQSSGLYSLSSVVTVPSSSLGTQTYICNVNHKPSNTKVDKKVEPKSCDKTHTCPPCPAPEELCWDWVFLFPPKPKDTLMISRTPEVTCVVVDVSHEDPEVKFNWYVDGVEVHNAKTKPREEQYNSTYRVVSVLTVLHQDWLNGKEYKCKVSNKALPAPIEKTISKAKGQPREPQVYTLPPSRDELTKNQVSLTCLVKGFYPSDIAVEWESNGQPENNYKTTPPVLDSDGSFFLYSKLTVDKSRWQQGNVFSCSVMHEALHNHYTQKSLSLSPGK

SEQ ID NO: 230 - protein, 470 aa, Artificial sequence
  Synthetic polypeptide
  misc_feature: Ritu-EEHCWDW
MDWTWRILFLVAAATGAHSQVQLQQPGAELVKPGASVKMSCKASGYTFTSYNMHWVKQTPGRGLEWIGAIYPGNGDTSYNQKFKGKATLTADKSSSTAYMQLSSLTSEDSAVYYCARSTYYGGDWYFNVWGAGTTVTVSAASTKGPSVFPLAPSSKSTSGGTAALGCLVKDYFPEPVTVSWNSGALTSGVHTFPAVLQSSGLYSLSSVVTVPSSSLGTQTYICNVNHKPSNTKVDKKVEPKSCDKTHTCPPCPAPEEHCWDWVFLFPPKPKDTLMISRTPEVTCVVVDVSHEDPEVKFNWYVDGVEVHNAKTKPREEQYNSTYRVVSVLTVLHQDWLNGKEYKCKVSNKALPAPIEKTISKAKGQPREPQVYTLPPSRDELTKNQVSLTCLVKGFYPSDIAVEWESNGQPENNYKTTPPVLDSDGSFFLYSKLTVDKSRWQQGNVFSCSVMHEALHNHYTQKSLSLSPGK

SEQ ID NO: 231 - protein, 470 aa, Artificial sequence
  Synthetic polypeptide
  misc_feature: Ritu-EEQCWDW
MDWTWRILFLVAAATGAHSQVQLQQPGAELVKPGASVKMSCKASGYTFTSYNMHWVKQTPGRGLEWIGAIYPGNGDTSYNQKFKGKATLTADKSSSTAYMQLSSLTSEDSAVYYCARSTYYGGDWYFNVWGAGTTVTVSAASTKGPSVFPLAPSSKSTSGGTAALGCLVKDYFPEPVTVSWNSGALTSGVHTFPAVLQSSGLYSLSSVVTVPSSSLGTQTYICNVNHKPSNTKVDKKVEPKSCDKTHTCPPCPAPEEQCWDWVFLFPPKPKDTLMISRTPEVTCVVVDVSHEDPEVKFNWYVDGVEVHNAKTKPREEQYNSTYRVVSVLTVLHQDWLNGKEYKCKVSNKALPAPIEKTISKAKGQPREPQVYTLPPSRDELTKNQVSLTCLVKGFYPSDIAVEWESNGQPENNYKTTPPVLDSDGSFFLYSKLTVDKSRWQQGNVFSCSVMHEALHNHYTQKSLSLSPGK

SEQ ID NO: 232 - protein, 470 aa, Artificial sequence
  Synthetic polypeptide
  misc_feature: Ritu-EEICWDW
MDWTWRILFLVAAATGAHSQVQLQQPGAELVKPGASVKMSCKASGYTFTSYNMHWVKQTPGRGLEWIGAIYPGNGDTSYNQKFKGKATLTADKSSSTAYMQLSSLTSEDSAVYYCARSTYYGGDWYFNVWGAGTTVTVSAASTKGPSVFPLAPSSKSTSGGTAALGCLVKDYFPEPVTVSWNSGALTSGVHTFPAVLQSSGLYSLSSVVTVPSSSLGTQTYICNVNHKPSNTKVDKKVEPKSCDKTHTCPPCPAPEEICWDWVFLFPPKPKDTLMISRTPEVTCVVVDVSHEDPEVKFNWYVDGVEVHNAKTKPREEQYNSTYRVVSVLTVLHQDWLNGKEYKCKVSNKALPAPIEKTISKAKGQPREPQVYTLPPSRDELTKNQVSLTCLVKGFYPSDIAVEWESNGQPENNYKTTPPVLDSDGSFFLYSKLTVDKSRWQQGNVFSCSVMHEALHNHYTQKSLSLSPGK

SEQ ID NO: 233 - protein, 470 aa, Artificial sequence
  Synthetic polypeptide
  misc_feature: Ritu-EEMCWDW
MDWTWRILFLVAAATGAHSQVQLQQPGAELVKPGASVKMSCKASGYTFTSYNMHWVKQTPGRGLEWIGAIYPGNGDTSYNQKFKGKATLTADKSSSTAYMQLSSLTSEDSAVYYCARSTYYGGDWYFNVWGAGTTVTVSAASTKGPSVFPLAPSSKSTSGGTAALGCLVKDYFPEPVTVSWNSGALTSGVHTFPAVLQSSGLYSLSSVVTVPSSSLGTQTYICNVNHKPSNTKVDKKVEPKSCDKTHTCPPCPAPEEMCWDWVFLFPPKPKDTLMISRTPEVTCVVVDVSHEDPEVKFNWYVDGVEVHNAKTKPREEQYNSTYRVVSVLTVLHQDWLNGKEYKCKVSNKALPAPIEKTISKAKGQPREPQVYTLPPSRDELTKNQVSLTCLVKGFYPSDIAVEWESNGQPENNYKTTPPVLDSDGSFFLYSKLTVDKSRWQQGNVFSCSVMHEALHNHYTQKSLSLSPGK

SEQ ID NO: 234 - protein, 470 aa, Artificial sequence
  Synthetic polypeptide
  misc_feature: Ritu-EENCWDW
MDWTWRILFLVAAATGAHSQVQLQQPGAELVKPGASVKMSCKASGYTFTSYNMHWVKQTPGRGLEWIGAIYPGNGDTSYNQKFKGKATLTADKSSSTAYMQLSSLTSEDSAVYYCARSTYYGGDWYFNVWGAGTTVTVSAASTKGPSVFPLAPSSKSTSGGTAALGCLVKDYFPEPVTVSWNSGALTSGVHTFPAVLQSSGLYSLSSVVTVPSSSLGTQTYICNVNHKPSNTKVDKKVEPKSCDKTHTCPPCPAPEENCWDWVFLFPPKPKDTLMISRTPEVTCVVVDVSHEDPEVKFNWYVDGVEVHNAKTKPREEQYNSTYRVVSVLTVLHQDWLNGKEYKCKVSNKALPAPIEKTISKAKGQPREPQVYTLPPSRDELTKNQVSLTCLVKGFYPSDIAVEWESNGQPENNYKTTPPVLDSDGSFFLYSKLTVDKSRWQQGNVFSCSVMHEALHNHYTQKSLSLSPGK

SEQ ID NO: 235 - protein, 470 aa, Artificial sequence
  Synthetic polypeptide
  misc_feature: Ritu-EEKCWDW
MDWTWRILFLVAAATGAHSQVQLQQPGAELVKPGASVKMSCKASGYTFTSYNMHWVKQTPGRGLEWIGAIYPGNGDTSYNQKFKGKATLTADKSSSTAYMQLSSLTSEDSAVYYCARSTYYGGDWYFNVWGAGTTVTVSAASTKGPSVFPLAPSSKSTSGGTAALGCLVKDYFPEPVTVSWNSGALTSGVHTFPAVLQSSGLYSLSSVVTVPSSSLGTQTYICNVNHKPSNTKVDKKVEPKSCDKTHTCPPCPAPEEKCWDWVFLFPPKPKDTLMISRTPEVTCVVVDVSHEDPEVKFNWYVDGVEVHNAKTKPREEQYNSTYRVVSVLTVLHQDWLNGKEYKCKVSNKALPAPIEKTISKAKGQPREPQVYTLPPSRDELTKNQVSLTCLVKGFYPSDIAVEWESNGQPENNYKTTPPVLDSDGSFFLYSKLTVDKSRWQQGNVFSCSVMHEALHNHYTQKSLSLSPGK

SEQ ID NO: 236 - protein, 470 aa, Artificial sequence
  Synthetic polypeptide
  misc_feature: Ritu-EEVCWDW
MDWTWRILFLVAAATGAHSQVQLQQPGAELVKPGASVKMSCKASGYTFTSYNMHWVKQTPGRGLEWIGAIYPGNGDTSYNQKFKGKATLTADKSSSTAYMQLSSLTSEDSAVYYCARSTYYGGDWYFNVWGAGTTVTVSAASTKGPSVFPLAPSSKSTSGGTAALGCLVKDYFPEPVTVSWNSGALTSGVHTFPAVLQSSGLYSLSSVVTVPSSSLGTQTYICNVNHKPSNTKVDKKVEPKSCDKTHTCPPCPAPEEVCWDWVFLFPPKPKDTLMISRTPEVTCVVVDVSHEDPEVKFNWYVDGVEVHNAKTKPREEQYNSTYRVVSVLTVLHQDWLNGKEYKCKVSNKALPAPIEKTISKAKGQPREPQVYTLPPSRDELTKNQVSLTCLVKGFYPSDIAVEWESNGQPENNYKTTPPVLDSDGSFFLYSKLTVDKSRWQQGNVFSCSVMHEALHNHYTQKSLSLSPGK

SEQ ID NO: 237 - protein, 470 aa, Artificial sequence
  Synthetic polypeptide
  misc_feature: Ritu-EEECWDW
MDWTWRILFLVAAATGAHSQVQLQQPGAELVKPGASVKMSCKASGYTFTSYNMHWVKQTPGRGLEWIGAIYPGNGDTSYNQKFKGKATLTADKSSSTAYMQLSSLTSEDSAVYYCARSTYYGGDWYFNVWGAGTTVTVSAASTKGPSVFPLAPSSKSTSGGTAALGCLVKDYFPEPVTVSWNSGALTSGVHTFPAVLQSSGLYSLSSVVTVPSSSLGTQTYICNVNHKPSNTKVDKKVEPKSCDKTHTCPPCPAPEEECWDWVFLFPPKPKDTLMISRTPEVTCVVVDVSHEDPEVKFNWYVDGVEVHNAKTKPREEQYNSTYRVVSVLTVLHQDWLNGKEYKCKVSNKALPAPIEKTISKAKGQPREPQVYTLPPSRDELTKNQVSLTCLVKGFYPSDIAVEWESNGQPENNYKTTPPVLDSDGSFFLYSKLTVDKSRWQQGNVFSCSVMHEALHNHYTQKSLSLSPGK

SEQ ID NO: 238 - protein, 470 aa, Artificial sequence
  Synthetic polypeptide
  misc_feature: Ritu-EEDCWDW
MDWTWRILFLVAAATGAHSQVQLQQPGAELVKPGASVKMSCKASGYTFTSYNMHWVKQTPGRGLEWIGAIYPGNGDTSYNQKFKGKATLTADKSSSTAYMQLSSLTSEDSAVYYCARSTYYGGDWYFNVWGAGTTVTVSAASTKGPSVFPLAPSSKSTSGGTAALGCLVKDYFPEPVTVSWNSGALTSGVHTFPAVLQSSGLYSLSSVVTVPSSSLGTQTYICNVNHKPSNTKVDKKVEPKSCDKTHTCPPCPAPEEDCWDWVFLFPPKPKDTLMISRTPEVTCVVVDVSHEDPEVKFNWYVDGVEVHNAKTKPREEQYNSTYRVVSVLTVLHQDWLNGKEYKCKVSNKALPAPIEKTISKAKGQPREPQVYTLPPSRDELTKNQVSLTCLVKGFYPSDIAVEWESNGQPENNYKTTPPVLDSDGSFFLYSKLTVDKSRWQQGNVFSCSVMHEALHNHYTQKSLSLSPGK

SEQ ID NO: 239 - protein, 470 aa, Artificial sequence
  Synthetic polypeptide
  misc_feature: Ritu-EESCWDW
MDWTWRILFLVAAATGAHSQVQLQQPGAELVKPGASVKMSCKASGYTFTSYNMHWVKQTPGRGLEWIGAIYPGNGDTSYNQKFKGKATLTADKSSSTAYMQLSSLTSEDSAVYYCARSTYYGGDWYFNVWGAGTTVTVSAASTKGPSVFPLAPSSKSTSGGTAALGCLVKDYFPEPVTVSWNSGALTSGVHTFPAVLQSSGLYSLSSVVTVPSSSLGTQTYICNVNHKPSNTKVDKKVEPKSCDKTHTCPPCPAPEESCWDWVFLFPPKPKDTLMISRTPEVTCVVVDVSHEDPEVKFNWYVDGVEVHNAKTKPREEQYNSTYRVVSVLTVLHQDWLNGKEYKCKVSNKALPAPIEKTISKAKGQPREPQVYTLPPSRDELTKNQVSLTCLVKGFYPSDIAVEWESNGQPENNYKTTPPVLDSDGSFFLYSKLTVDKSRWQQGNVFSCSVMHEALHNHYTQKSLSLSPGK

SEQ ID NO: 240 - protein, 470 aa, Artificial sequence
  Synthetic polypeptide
  misc_feature: Ritu-EECCWDW
MDWTWRILFLVAAATGAHSQVQLQQPGAELVKPGASVKMSCKASGYTFTSYNMHWVKQTPGRGLEWIGAIYPGNGDTSYNQKFKGKATLTADKSSSTAYMQLSSLTSEDSAVYYCARSTYYGGDWYFNVWGAGTTVTVSAASTKGPSVFPLAPSSKSTSGGTAALGCLVKDYFPEPVTVSWNSGALTSGVHTFPAVLQSSGLYSLSSVVTVPSSSLGTQTYICNVNHKPSNTKVDKKVEPKSCDKTHTCPPCPAPEECCWDWVFLFPPKPKDTLMISRTPEVTCVVVDVSHEDPEVKFNWYVDGVEVHNAKTKPREEQYNSTYRVVSVLTVLHQDWLNGKEYKCKVSNKALPAPIEKTISKAKGQPREPQVYTLPPSRDELTKNQVSLTCLVKGFYPSDIAVEWESNGQPENNYKTTPPVLDSDGSFFLYSKLTVDKSRWQQGNVFSCSVMHEALHNHYTQKSLSLSPGK

SEQ ID NO: 241 - protein, 470 aa, Artificial sequence
  Synthetic polypeptide
  misc_feature: Ritu-EEWCWDW
MDWTWRILFLVAAATGAHSQVQLQQPGAELVKPGASVKMSCKASGYTFTSYNMHWVKQTPGRGLEWIGAIYPGNGDTSYNQKFKGKATLTADKSSSTAYMQLSSLTSEDSAVYYCARSTYYGGDWYFNVWGAGTTVTVSAASTKGPSVFPLAPSSKSTSGGTAALGCLVKDYFPEPVTVSWNSGALTSGVHTFPAVLQSSGLYSLSSVVTVPSSSLGTQTYICNVNHKPSNTKVDKKVEPKSCDKTHTCPPCPAPEEWCWDWVFLFPPKPKDTLMISRTPEVTCVVVDVSHEDPEVKFNWYVDGVEVHNAKTKPREEQYNSTYRVVSVLTVLHQDWLNGKEYKCKVSNKALPAPIEKTISKAKGQPREPQVYTLPPSRDELTKNQVSLTCLVKGFYPSDIAVEWESNGQPENNYKTTPPVLDSDGSFFLYSKLTVDKSRWQQGNVFSCSVMHEALHNHYTQKSLSLSPGK

SEQ ID NO: 242 - protein, 470 aa, Artificial sequence
  Synthetic polypeptide
  misc_feature: Ritu-EEPCWDW
MDWTWRILFLVAAATGAHSQVQLQQPGAELVKPGASVKMSCKASGYTFTSYNMHWVKQTPGRGLEWIGAIYPGNGDTSYNQKFKGKATLTADKSSSTAYMQLSSLTSEDSAVYYCARSTYYGGDWYFNVWGAGTTVTVSAASTKGPSVFPLAPSSKSTSGGTAALGCLVKDYFPEPVTVSWNSGALTSGVHTFPAVLQSSGLYSLSSVVTVPSSSLGTQTYICNVNHKPSNTKVDKKVEPKSCDKTHTCPPCPAPEEPCWDWVFLFPPKPKDTLMISRTPEVTCVVVDVSHEDPEVKFNWYVDGVEVHNAKTKPREEQYNSTYRVVSVLTVLHQDWLNGKEYKCKVSNKALPAPIEKTISKAKGQPREPQVYTLPPSRDELTKNQVSLTCLVKGFYPSDIAVEWESNGQPENNYKTTPPVLDSDGSFFLYSKLTVDKSRWQQGNVFSCSVMHEALHNHYTQKSLSLSPGK

SEQ ID NO: 243 - protein, 470 aa, Artificial sequence
  Synthetic polypeptide
  misc_feature: Ritu-EERCWDW
MDWTWRILFLVAAATGAHSQVQLQQPGAELVKPGASVKMSCKASGYTFTSYNMHWVKQTPGRGLEWIGAIYPGNGDTSYNQKFKGKATLTADKSSSTAYMQLSSLTSEDSAVYYCARSTYYGGDWYFNVWGAGTTVTVSAASTKGPSVFPLAPSSKSTSGGTAALGCLVKDYFPEPVTVSWNSGALTSGVHTFPAVLQSSGLYSLSSVVTVPSSSLGTQTYICNVNHKPSNTKVDKKVEPKSCDKTHTCPPCPAPEERCWDWVFLFPPKPKDTLMISRTPEVTCVVVDVSHEDPEVKFNWYVDGVEVHNAKTKPREEQYNSTYRVVSVLTVLHQDWLNGKEYKCKVSNKALPAPIEKTISKAKGQPREPQVYTLPPSRDELTKNQVSLTCLVKGFYPSDIAVEWESNGQPENNYKTTPPVLDSDGSFFLYSKLTVDKSRWQQGNVFSCSVMHEALHNHYTQKSLSLSPGK

SEQ ID NO: 244 - protein, 470 aa, Artificial sequence
  Synthetic polypeptide
  misc_feature: Ritu-EEACWDW
MDWTWRILFLVAAATGAHSQVQLQQPGAELVKPGASVKMSCKASGYTFTSYNMHWVKQTPGRGLEWIGAIYPGNGDTSYNQKFKGKATLTADKSSSTAYMQLSSLTSEDSAVYYCARSTYYGGDWYFNVWGAGTTVTVSAASTKGPSVFPLAPSSKSTSGGTAALGCLVKDYFPEPVTVSWNSGALTSGVHTFPAVLQSSGLYSLSSVVTVPSSSLGTQTYICNVNHKPSNTKVDKKVEPKSCDKTHTCPPCPAPEEACWDWVFLFPPKPKDTLMISRTPEVTCVVVDVSHEDPEVKFNWYVDGVEVHNAKTKPREEQYNSTYRVVSVLTVLHQDWLNGKEYKCKVSNKALPAPIEKTISKAKGQPREPQVYTLPPSRDELTKNQVSLTCLVKGFYPSDIAVEWESNGQPENNYKTTPPVLDSDGSFFLYSKLTVDKSRWQQGNVFSCSVMHEALHNHYTQKSLSLSPGK

SEQ ID NO: 245 - protein, 470 aa, Artificial sequence
  Synthetic polypeptide
  misc_feature: Ritu-EEGCWDW
MDWTWRILFLVAAATGAHSQVQLQQPGAELVKPGASVKMSCKASGYTFTSYNMHWVKQTPGRGLEWIGAIYPGNGDTSYNQKFKGKATLTADKSSSTAYMQLSSLTSEDSAVYYCARSTYYGGDWYFNVWGAGTTVTVSAASTKGPSVFPLAPSSKSTSGGTAALGCLVKDYFPEPVTVSWNSGALTSGVHTFPAVLQSSGLYSLSSVVTVPSSSLGTQTYICNVNHKPSNTKVDKKVEPKSCDKTHTCPPCPAPEEGCWDWVFLFPPKPKDTLMISRTPEVTCVVVDVSHEDPEVKFNWYVDGVEVHNAKTKPREEQYNSTYRVVSVLTVLHQDWLNGKEYKCKVSNKALPAPIEKTISKAKGQPREPQVYTLPPSRDELTKNQVSLTCLVKGFYPSDIAVEWESNGQPENNYKTTPPVLDSDGSFFLYSKLTVDKSRWQQGNVFSCSVMHEALHNHYTQKSLSLSPGK

SEQ ID NO: 246 - protein, 470 aa, Artificial sequence; identical to SEQ ID NO: 188
  Synthetic polypeptide
  misc_feature: Ritu-EETFWDW

SEQ ID NO: 247 - protein, 470 aa, Artificial sequence
  Synthetic polypeptide
  misc_feature: Ritu-EETYWDW
MDWTWRILFLVAAATGAHSQVQLQQPGAELVKPGASVKMSCKASGYTFTSYNMHWVKQTPGRGLEWIGAIYPGNGDTSYNQKFKGKATLTADKSSSTAYMQLSSLTSEDSAVYYCARSTYYGGDWYFNVWGAGTTVTVSAASTKGPSVFPLAPSSKSTSGGTAALGCLVKDYFPEPVTVSWNSGALTSGVHTFPAVLQSSGLYSLSSVVTVPSSSLGTQTYICNVNHKPSNTKVDKKVEPKSCDKTHTCPPCPAPEETYWDWVFLFPPKPKDTLMISRTPEVTCVVVDVSHEDPEVKFNWYVDGVEVHNAKTKPREEQYNSTYRVVSVLTVLHQDWLNGKEYKCKVSNKALPAPIEKTISKAKGQPREPQVYTLPPSRDELTKNQVSLTCLVKGFYPSDIAVEWESNGQPENNYKTTPPVLDSDGSFFLYSKLTVDKSRWQQGNVFSCSVMHEALHNHYTQKSLSLSPGK

SEQ ID NO: 248 - protein, 470 aa, Artificial sequence
  Synthetic polypeptide
  misc_feature: Ritu-EETLWDW
MDWTWRILFLVAAATGAHSQVQLQQPGAELVKPGASVKMSCKASGYTFTSYNMHWVKQTPGRGLEWIGAIYPGNGDTSYNQKFKGKATLTADKSSSTAYMQLSSLTSEDSAVYYCARSTYYGGDWYFNVWGAGTTVTVSAASTKGPSVFPLAPSSKSTSGGTAALGCLVKDYFPEPVTVSWNSGALTSGVHTFPAVLQSSGLYSLSSVVTVPSSSLGTQTYICNVNHKPSNTKVDKKVEPKSCDKTHTCPPCPAPEETLWDWVFLFPPKPKDTLMISRTPEVTCVVVDVSHEDPEVKFNWYVDGVEVHNAKTKPREEQYNSTYRVVSVLTVLHQDWLNGKEYKCKVSNKALPAPIEKTISKAKGQPREPQVYTLPPSRDELTKNQVSLTCLVKGFYPSDIAVEWESNGQPENNYKTTPPVLDSDGSFFLYSKLTVDKSRWQQGNVFSCSVMHEALHNHYTQKSLSLSPGK

SEQ ID NO: 249 - protein, 470 aa, Artificial sequence
  Synthetic polypeptide
  misc_feature: Ritu-EETHWDW
MDWTWRILFLVAAATGAHSQVQLQQPGAELVKPGASVKMSCKASGYTFTSYNMHWVKQTPGRGLEWIGAIYPGNGDTSYNQKFKGKATLTADKSSSTAYMQLSSLTSEDSAVYYCARSTYYGGDWYFNVWGAGTTVTVSAASTKGPSVFPLAPSSKSTSGGTAALGCLVKDYFPEPVTVSWNSGALTSGVHTFPAVLQSSGLYSLSSVVTVPSSSLGTQTYICNVNHKPSNTKVDKKVEPKSCDKTHTCPPCPAPEETHWDWVFLFPPKPKDTLMISRTPEVTCVVVDVSHEDPEVKFNWYVDGVEVHNAKTKPREEQYNSTYRVVSVLTVLHQDWLNGKEYKCKVSNKALPAPIEKTISKAKGQPREPQVYTLPPSRDELTKNQVSLTCLVKGFYPSDIAVEWESNGQPENNYKTTPPVLDSDGSFFLYSKLTVDKSRWQQGNVFSCSVMHEALHNHYTQKSLSLSPGK

SEQ ID NO: 250 - protein, 470 aa, Artificial sequence
  Synthetic polypeptide
  misc_feature: Ritu-EETQWDW
MDWTWRILFLVAAATGAHSQVQLQQPGAELVKPGASVKMSCKASGYTFTSYNMHWVKQTPGRGLEWIGAIYPGNGDTSYNQKFKGKATLTADKSSSTAYMQLSSLTSEDSAVYYCARSTYYGGDWYFNVWGAGTTVTVSAASTKGPSVFPLAPSSKSTSGGTAALGCLVKDYFPEPVTVSWNSGALTSGVHTFPAVLQSSGLYSLSSVVTVPSSSLGTQTYICNVNHKPSNTKVDKKVEPKSCDKTHTCPPCPAPEETQWDWVFLFPPKPKDTLMISRTPEVTCVVVDVSHEDPEVKFNWYVDGVEVHNAKTKPREEQYNSTYRVVSVLTVLHQDWLNGKEYKCKVSNKALPAPIEKTISKAKGQPREPQVYTLPPSRDELTKNQVSLTCLVKGFYPSDIAVEWESNGQPENNYKTTPPVLDSDGSFFLYSKLTVDKSRWQQGNVFSCSVMHEALHNHYTQKSLSLSPGK

SEQ ID NO: 251 - protein, 470 aa, Artificial sequence
  Synthetic polypeptide
  misc_feature: Ritu-EETIWDW
MDWTWRILFLVAAATGAHSQVQLQQPGAELVKPGASVKMSCKASGYTFTSYNMHWVKQTPGRGLEWIGAIYPGNGDTSYNQKFKGKATLTADKSSSTAYMQLSSLTSEDSAVYYCARSTYYGGDWYFNVWGAGTTVTVSAASTKGPSVFPLAPSSKSTSGGTAALGCLVKDYFPEPVTVSWNSGALTSGVHTFPAVLQSSGLYSLSSVVTVPSSSLGTQTYICNVNHKPSNTKVDKKVEPKSCDKTHTCPPCPAPEETIWDWVFLFPPKPKDTLMISRTPEVTCVVVDVSHEDPEVKFNWYVDGVEVHNAKTKPREEQYNSTYRVVSVLTVLHQDWLNGKEYKCKVSNKALPAPIEKTISKAKGQPREPQVYTLPPSRDELTKNQVSLTCLVKGFYPSDIAVEWESNGQPENNYKTTPPVLDSDGSFFLYSKLTVDKSRWQQGNVFSCSVMHEALHNHYTQKSLSLSPGK

SEQ ID NO: 252 - protein, 470 aa, Artificial sequence
  Synthetic polypeptide
  misc_feature: Ritu-EETMWDW
MDWTWRILFLVAAATGAHSQVQLQQPGAELVKPGASVKMSCKASGYTFTSYNMHWVKQTPGRGLEWIGAIYPGNGDTSYNQKFKGKATLTADKSSSTAYMQLSSLTSEDSAVYYCARSTYYGGDWYFNVWGAGTTVTVSAASTKGPSVFPLAPSSKSTSGGTAALGCLVKDYFPEPVTVSWNSGALTSGVHTFPAVLQSSGLYSLSSVVTVPSSSLGTQTYICNVNHKPSNTKVDKKVEPKSCDKTHTCPPCPAPEETMWDWVFLFPPKPKDTLMISRTPEVTCVVVDVSHEDPEVKFNWYVDGVEVHNAKTKPREEQYNSTYRVVSVLTVLHQDWLNGKEYKCKVSNKALPAPIEKTISKAKGQPREPQVYTLPPSRDELTKNQVSLTCLVKGFYPSDIAVEWESNGQPENNYKTTPPVLDSDGSFFLYSKLTVDKSRWQQGNVFSCSVMHEALHNHYTQKSLSLSPGK

SEQ ID NO: 253 - protein, 470 aa, Artificial sequence
  Synthetic polypeptide
  misc_feature: Ritu-EETNWDW
MDWTWRILFLVAAATGAHSQVQLQQPGAELVKPGASVKMSCKASGYTFTSYNMHWVKQTPGRGLEWIGAIYPGNGDTSYNQKFKGKATLTADKSSSTAYMQLSSLTSEDSAVYYCARSTYYGGDWYFNVWGAGTTVTVSAASTKGPSVFPLAPSSKSTSGGTAALGCLVKDYFPEPVTVSWNSGALTSGVHTFPAVLQSSGLYSLSSVVTVPSSSLGTQTYICNVNHKPSNTKVDKKVEPKSCDKTHTCPPCPAPEETNWDWVFLFPPKPKDTLMISRTPEVTCVVVDVSHEDPEVKFNWYVDGVEVHNAKTKPREEQYNSTYRVVSVLTVLHQDWLNGKEYKCKVSNKALPAPIEKTISKAKGQPREPQVYTLPPSRDELTKNQVSLTCLVKGFYPSDIAVEWESNGQPENNYKTTPPVLDSDGSFFLYSKLTVDKSRWQQGNVFSCSVMHEALHNHYTQKSLSLSPGK

SEQ ID NO: 254 - protein, 470 aa, Artificial sequence
  Synthetic polypeptide
  misc_feature: Ritu-EETKWDW
MDWTWRILFLVAAATGAHSQVQLQQPGAELVKPGASVKMSCKASGYTFTSYNMHWVKQTPGRGLEWIGAIYPGNGDTSYNQKFKGKATLTADKSSSTAYMQLSSLTSEDSAVYYCARSTYYGGDWYFNVWGAGTTVTVSAASTKGPSVFPLAPSSKSTSGGTAALGCLVKDYFPEPVTVSWNSGALTSGVHTFPAVLQSSGLYSLSSVVTVPSSSLGTQTYICNVNHKPSNTKVDKKVEPKSCDKTHTCPPCPAPEETKWDWVFLFPPKPKDTLMISRTPEVTCVVVDVSHEDPEVKFNWYVDGVEVHNAKTKPREEQYNSTYRVVSVLTVLHQDWLNGKEYKCKVSNKALPAPIEKTISKAKGQPREPQVYTLPPSRDELTKNQVSLTCLVKGFYPSDIAVEWESNGQPENNYKTTPPVLDSDGSFFLYSKLTVDKSRWQQGNVFSCSVMHEALHNHYTQKSLSLSPGK

SEQ ID NO: 255 - protein, 470 aa, Artificial sequence
  Synthetic polypeptide
  misc_feature: Ritu-EETVWDW
MDWTWRILFLVAAATGAHSQVQLQQPGAELVKPGASVKMSCKASGYTFTSYNMHWVKQTPGRGLEWIGAIYPGNGDTSYNQKFKGKATLTADKSSSTAYMQLSSLTSEDSAVYYCARSTYYGGDWYFNVWGAGTTVTVSAASTKGPSVFPLAPSSKSTSGGTAALGCLVKDYFPEPVTVSWNSGALTSGVHTFPAVLQSSGLYSLSSVVTVPSSSLGTQTYICNVNHKPSNTKVDKKVEPKSCDKTHTCPPCPAPEETVWDWVFLFPPKPKDTLMISRTPEVTCVVVDVSHEDPEVKFNWYVDGVEVHNAKTKPREEQYNSTYRVVSVLTVLHQDWLNGKEYKCKVSNKALPAPIEKTISKAKGQPREPQVYTLPPSRDELTKNQVSLTCLVKGFYPSDIAVEWESNGQPENNYKTTPPVLDSDGSFFLYSKLTVDKSRWQQGNVFSCSVMHEALHNHYTQKSLSLSPGK

SEQ ID NO: 256 - protein, 470 aa, Artificial sequence
  Synthetic polypeptide
  misc_feature: Ritu-EETEWDW
MDWTWRILFLVAAATGAHSQVQLQQPGAELVKPGASVKMSCKASGYTFTSYNMHWVKQTPGRGLEWIGAIYPGNGDTSYNQKFKGKATLTADKSSSTAYMQLSSLTSEDSAVYYCARSTYYGGDWYFNVWGAGTTVTVSAASTKGPSVFPLAPSSKSTSGGTAALGCLVKDYFPEPVTVSWNSGALTSGVHTFPAVLQSSGLYSLSSVVTVPSSSLGTQTYICNVNHKPSNTKVDKKVEPKSCDKTHTCPPCPAPEETEWDWVFLFPPKPKDTLMISRTPEVTCVVVDVSHEDPEVKFNWYVDGVEVHNAKTKPREEQYNSTYRVVSVLTVLHQDWLNGKEYKCKVSNKALPAPIEKTISKAKGQPREPQVYTLPPSRDELTKNQVSLTCLVKGFYPSDIAVEWESNGQPENNYKTTPPVLDSDGSFFLYSKLTVDKSRWQQGNVFSCSVMHEALHNHYTQKSLSLSPGK

SEQ ID NO: 257 - protein, 470 aa, Artificial sequence
  Synthetic polypeptide
  misc_feature: Ritu-EETDWDW
MDWTWRILFLVAAATGAHSQVQLQQPGAELVKPGASVKMSCKASGYTFTSYNMHWVKQTPGRGLEWIGAIYPGNGDTSYNQKFKGKATLTADKSSSTAYMQLSSLTSEDSAVYYCARSTYYGGDWYFNVWGAGTTVTVSAASTKGPSVFPLAPSSKSTSGGTAALGCLVKDYFPEPVTVSWNSGALTSGVHTFPAVLQSSGLYSLSSVVTVPSSSLGTQTYICNVNHKPSNTKVDKKVEPKSCDKTHTCPPCPAPEETDWDWVFLFPPKPKDTLMISRTPEVTCVVVDVSHEDPEVKFNWYVDGVEVHNAKTKPREEQYNSTYRVVSVLTVLHQDWLNGKEYKCKVSNKALPAPIEKTISKAKGQPREPQVYTLPPSRDELTKNQVSLTCLVKGFYPSDIAVEWESNGQPENNYKTTPPVLDSDGSFFLYSKLTVDKSRWQQGNVFSCSVMHEALHNHYTQKSLSLSPGK

SEQ ID NO: 258 - protein, 470 aa, Artificial sequence
  Synthetic polypeptide
  misc_feature: Ritu-EETSWDW
MDWTWRILFLVAAATGAHSQVQLQQPGAELVKPGASVKMSCKASGYTFTSYNMHWVKQTPGRGLEWIGAIYPGNGDTSYNQKFKGKATLTADKSSSTAYMQLSSLTSEDSAVYYCARSTYYGGDWYFNVWGAGTTVTVSAASTKGPSVFPLAPSSKSTSGGTAALGCLVKDYFPEPVTVSWNSGALTSGVHTFPAVLQSSGLYSLSSVVTVPSSSLGTQTYICNVNHKPSNTKVDKKVEPKSCDKTHTCPPCPAPEETSWDWVFLFPPKPKDTLMISRTPEVTCVVVDVSHEDPEVKFNWYVDGVEVHNAKTKPREEQYNSTYRVVSVLTVLHQDWLNGKEYKCKVSNKALPAPIEKTISKAKGQPREPQVYTLPPSRDELTKNQVSLTCLVKGFYPSDIAVEWESNGQPENNYKTTPPVLDSDGSFFLYSKLTVDKSRWQQGNVFSCSVMHEALHNHYTQKSLSLSPGK

SEQ ID NO: 259 - protein, 470 aa, Artificial sequence
  Synthetic polypeptide
  misc_feature: Ritu-EETWWDW
MDWTWRILFLVAAATGAHSQVQLQQPGAELVKPGASVKMSCKASGYTFTSYNMHWVKQTPGRGLEWIGAIYPGNGDTSYNQKFKGKATLTADKSSSTAYMQLSSLTSEDSAVYYCARSTYYGGDWYFNVWGAGTTVTVSAASTKGPSVFPLAPSSKSTSGGTAALGCLVKDYFPEPVTVSWNSGALTSGVHTFPAVLQSSGLYSLSSVVTVPSSSLGTQTYICNVNHKPSNTKVDKKVEPKSCDKTHTCPPCPAPEETWWDWVFLFPPKPKDTLMISRTPEVTCVVVDVSHEDPEVKFNWYVDGVEVHNAKTKPREEQYNSTYRVVSVLTVLHQDWLNGKEYKCKVSNKALPAPIEKTISKAKGQPREPQVYTLPPSRDELTKNQVSLTCLVKGFYPSDIAVEWESNGQPENNYKTTPPVLDSDGSFFLYSKLTVDKSRWQQGNVFSCSVMHEALHNHYTQKSLSLSPGK

SEQ ID NO: 260 - protein, 470 aa, Artificial sequence
  Synthetic polypeptide
  misc_feature: Ritu-EETPWDW
MDWTWRILFLVAAATGAHSQVQLQQPGAELVKPGASVKMSCKASGYTFTSYNMHWVKQTPGRGLEWIGAIYPGNGDTSYNQKFKGKATLTADKSSSTAYMQLSSLTSEDSAVYYCARSTYYGGDWYFNVWGAGTTVTVSAASTKGPSVFPLAPSSKSTSGGTAALGCLVKDYFPEPVTVSWNSGALTSGVHTFPAVLQSSGLYSLSSVVTVPSSSLGTQTYICNVNHKPSNTKVDKKVEPKSCDKTHTCPPCPAPEETPWDWVFLFPPKPKDTLMISRTPEVTCVVVDVSHEDPEVKFNWYVDGVEVHNAKTKPREEQYNSTYRVVSVLTVLHQDWLNGKEYKCKVSNKALPAPIEKTISKAKGQPREPQVYTLPPSRDELTKNQVSLTCLVKGFYPSDIAVEWESNGQPENNYKTTPPVLDSDGSFFLYSKLTVDKSRWQQGNVFSCSVMHEALHNHYTQKSLSLSPGK

SEQ ID NO: 261 - protein, 470 aa, Artificial sequence
  Synthetic polypeptide
  misc_feature: Ritu-EETRWDW
MDWTWRILFLVAAATGAHSQVQLQQPGAELVKPGASVKMSCKASGYTFTSYNMHWVKQTPGRGLEWIGAIYPGNGDTSYNQKFKGKATLTADKSSSTAYMQLSSLTSEDSAVYYCARSTYYGGDWYFNVWGAGTTVTVSAASTKGPSVFPLAPSSKSTSGGTAALGCLVKDYFPEPVTVSWNSGALTSGVHTFPAVLQSSGLYSLSSVVTVPSSSLGTQTYICNVNHKPSNTKVDKKVEPKSCDKTHTCPPCPAPEETRWDWVFLFPPKPKDTLMISRTPEVTCVVVDVSHEDPEVKFNWYVDGVEVHNAKTKPREEQYNSTYRVVSVLTVLHQDWLNGKEYKCKVSNKALPAPIEKTISKAKGQPREPQVYTLPPSRDELTKNQVSLTCLVKGFYPSDIAVEWESNGQPENNYKTTPPVLDSDGSFFLYSKLTVDKSRWQQGNVFSCSVMHEALHNHYTQKSLSLSPGK

SEQ ID NO: 262 - protein, 470 aa, Artificial sequence
  Synthetic polypeptide
  misc_feature: Ritu-EETTWDW
MDWTWRILFLVAAATGAHSQVQLQQPGAELVKPGASVKMSCKASGYTFTSYNMHWVKQTPGRGLEWIGAIYPGNGDTSYNQKFKGKATLTADKSSSTAYMQLSSLTSEDSAVYYCARSTYYGGDWYFNVWGAGTTVTVSAASTKGPSVFPLAPSSKSTSGGTAALGCLVKDYFPEPVTVSWNSGALTSGVHTFPAVLQSSGLYSLSSVVTVPSSSLGTQTYICNVNHKPSNTKVDKKVEPKSCDKTHTCPPCPAPEETTWDWVFLFPPKPKDTLMISRTPEVTCVVVDVSHEDPEVKFNWYVDGVEVHNAKTKPREEQYNSTYRVVSVLTVLHQDWLNGKEYKCKVSNKALPAPIEKTISKAKGQPREPQVYTLPPSRDELTKNQVSLTCLVKGFYPSDIAVEWESNGQPENNYKTTPPVLDSDGSFFLYSKLTVDKSRWQQGNVFSCSVMHEALHNHYTQKSLSLSPGK

SEQ ID NO: 263 - protein, 470 aa, Artificial sequence
  Synthetic polypeptide
  misc_feature: Ritu-EETAWDW
MDWTWRILFLVAAATGAHSQVQLQQPGAELVKPGASVKMSCKASGYTFTSYNMHWVKQTPGRGLEWIGAIYPGNGDTSYNQKFKGKATLTADKSSSTAYMQLSSLTSEDSAVYYCARSTYYGGDWYFNVWGAGTTVTVSAASTKGPSVFPLAPSSKSTSGGTAALGCLVKDYFPEPVTVSWNSGALTSGVHTFPAVLQSSGLYSLSSVVTVPSSSLGTQTYICNVNHKPSNTKVDKKVEPKSCDKTHTCPPCPAPEETAWDWVFLFPPKPKDTLMISRTPEVTCVVVDVSHEDPEVKFNWYVDGVEVHNAKTKPREEQYNSTYRVVSVLTVLHQDWLNGKEYKCKVSNKALPAPIEKTISKAKGQPREPQVYTLPPSRDELTKNQVSLTCLVKGFYPSDIAVEWESNGQPENNYKTTPPVLDSDGSFFLYSKLTVDKSRWQQGNVFSCSVMHEALHNHYTQKSLSLSPGK

SEQ ID NO: 264 - protein, 470 aa, Artificial sequence
  Synthetic polypeptide
  misc_feature: Ritu-EETGWDW
MDWTWRILFLVAAATGAHSQVQLQQPGAELVKPGASVKMSCKASGYTFTSYNMHWVKQTPGRGLEWIGAIYPGNGDTSYNQKFKGKATLTADKSSSTAYMQLSSLTSEDSAVYYCARSTYYGGDWYFNVWGAGTTVTVSAASTKGPSVFPLAPSSKSTSGGTAALGCLVKDYFPEPVTVSWNSGALTSGVHTFPAVLQSSGLYSLSSVVTVPSSSLGTQTYICNVNHKPSNTKVDKKVEPKSCDKTHTCPPCPAPEETGWDWVFLFPPKPKDTLMISRTPEVTCVVVDVSHEDPEVKFNWYVDGVEVHNAKTKPREEQYNSTYRVVSVLTVLHQDWLNGKEYKCKVSNKALPAPIEKTISKAKGQPREPQVYTLPPSRDELTKNQVSLTCLVKGFYPSDIAVEWESNGQPENNYKTTPPVLDSDGSFFLYSKLTVDKSRWQQGNVFSCSVMHEALHNHYTQKSLSLSPGK

SEQ ID NO: 265 - protein, 470 aa, Artificial sequence; identical to SEQ ID NO: 188
  Synthetic polypeptide
  misc_feature: Ritu-EETCWDD

SEQ ID NO: 266 - protein, 470 aa, Artificial sequence; identical to SEQ ID NO: 250
  Synthetic polypeptide
  misc_feature: Ritu-EETQWDD

SEQ ID NO: 267 - DNA, 19 bp, Artificial sequence
  Synthetic polynucleotide
  misc_feature: IgG1FcDELTA16 common reverse primer
gggccgagcggcgtggagc

SEQ ID NO: 268 - DNA, 27 bp, Artificial sequence
  Synthetic polynucleotide
  misc_feature: IgG1FcDELTA16_S forward primer
tcagtcttcctcttccccccaaaaccc

SEQ ID NO: 269 - DNA, 27 bp, Artificial sequence
  Synthetic polynucleotide
  misc_feature: IgG1FcDELTA16_F forward primer
tttgtcttcctcttccccccaaaaccc

SEQ ID NO: 270 - DNA, 27 bp, Artificial sequence
  Synthetic polynucleotide
  misc_feature: IgG1FcDELTA16_Y forward primer
tatgtcttcctcttccccccaaaaccc

SEQ ID NO: 271 - DNA, 27 bp, Artificial sequence
  Synthetic polynucleotide
  misc_feature: IgG1FcDELTA16_L forward primer
ctggtcttcctcttccccccaaaaccc

SEQ ID NO: 272 - DNA, 27 bp, Artificial sequence
  Synthetic polynucleotide
  misc_feature: IgG1FcDELTA16_H forward primer
catgtcttcctcttccccccaaaaccc

SEQ ID NO: 273 - DNA, 27 bp, Artificial sequence
  Synthetic polynucleotide
  misc_feature: IgG1FcDELTA16_Q forward primer
caggtcttcctcttccccccaaaaccc

SEQ ID NO: 274 - DNA, 27 bp, Artificial sequence
  Synthetic polynucleotide
  misc_feature: IgG1FcDELTA16_I forward primer
attgtcttcctcttccccccaaaaccc

SEQ ID NO: 275 - DNA, 27 bp, Artificial sequence
  Synthetic polynucleotide
  misc_feature: IgG1FcDELTA16_M forward primer
atggtcttcctcttccccccaaaaccc

SEQ ID NO: 276 - DNA, 27 bp, Artificial sequence
  Synthetic polynucleotide
  misc_feature: IgG1FcDELTA16_N forward primer
aacgtcttcctcttccccccaaaaccc

SEQ ID NO: 277 - DNA, 27 bp, Artificial sequence
  Synthetic polynucleotide
  misc_feature: IgG1FcDELTA16_K forward primer
aaagtcttcctcttccccccaaaaccc

SEQ ID NO: 278 - DNA, 27 bp, Artificial sequence
  Synthetic polynucleotide
  misc_feature: IgG1FcDELTA16_V forward primer
gtggtcttcctcttccccccaaaaccc

SEQ ID NO: 279 - DNA, 27 bp, Artificial sequence
  Synthetic polynucleotide
  misc_feature: IgG1FcDELTA16_E forward primer
gaagtcttcctcttccccccaaaaccc

SEQ ID NO: 280 - DNA, 27 bp, Artificial sequence
  Synthetic polynucleotide
  misc_feature: IgG1FcDELTA16_D forward primer
gatgtcttcctcttccccccaaaaccc

SEQ ID NO: 281 - DNA, 27 bp, Artificial sequence
  Synthetic polynucleotide
  misc_feature: IgG1FcDELTA16_C forward primer
tgcgtcttcctcttccccccaaaaccc

SEQ ID NO: 282 - DNA, 27 bp, Artificial sequence
  Synthetic polynucleotide
  misc_feature: IgG1FcDELTA16_W forward primer
tgggtcttcctcttccccccaaaaccc

SEQ ID NO: 283 - DNA, 27 bp, Artificial sequence
  Synthetic polynucleotide
  misc_feature: IgG1FcDELTA16_P forward primer
ccggtcttcctcttccccccaaaaccc

SEQ ID NO: 284 - DNA, 27 bp, Artificial sequence
  Synthetic polynucleotide
  misc_feature: IgG1FcDELTA16_R forward primer
cgtgtcttcctcttccccccaaaaccc

SEQ ID NO: 285 - DNA, 27 bp, Artificial sequence
  Synthetic polynucleotide
  misc_feature: IgG1FcDELTA16_T forward primer
accgtcttcctcttccccccaaaaccc

SEQ ID NO: 286 - DNA, 27 bp, Artificial sequence
  Synthetic polynucleotide
  misc_feature: IgG1FcDELTA16_A forward primer
gcggtcttcctcttccccccaaaaccc

SEQ ID NO: 287 - DNA, 27 bp, Artificial sequence
  Synthetic polynucleotide
  misc_feature: IgG1FcDELTA16_G forward primer
ggcgtcttcctcttccccccaaaaccc

SEQ ID NO: 288 - DNA, 30 bp, Artificial sequence
  Synthetic polynucleotide
  misc_feature: IgG1FcDELTA16_SS
tcaagcgtcttcctcttccccccaaaaccc

SEQ ID NO: 289 - DNA, 30 bp, Artificial sequence
  Synthetic polynucleotide
  misc_feature: IgG1FcDELTA16_FS forward primer
tttagcgtcttcctcttccccccaaaaccc

SEQ ID NO: 290 - DNA, 30 bp, Artificial sequence
  Synthetic polynucleotide
  misc_feature: IgG1FcDELTA16_YS forward primer
tatagcgtcttcctcttccccccaaaaccc

SEQ ID NO: 291 - DNA, 30 bp, Artificial sequence
  Synthetic polynucleotide
  misc_feature: IgG1FcDELTA16_LS forward primer
ctgagcgtcttcctcttccccccaaaaccc

SEQ ID NO: 292 - DNA, 30 bp, Artificial sequence
  Synthetic polynucleotide
  misc_feature: IgG1FcDELTA16_HS forward primer
catagcgtcttcctcttccccccaaaaccc

SEQ ID NO: 293 - DNA, 30 bp, Artificial sequence
  Synthetic polynucleotide
  misc_feature: IgG1FcDELTA16_QS forward primer
cagagcgtcttcctcttccccccaaaaccc

SEQ ID NO: 294 - DNA, 30 bp, Artificial sequence
  Synthetic polynucleotide
  misc_feature: IgG1FcDELTA16_IS forward primer
attagcgtcttcctcttccccccaaaaccc

SEQ ID NO: 295 - DNA, 30 bp, Artificial sequence
  Synthetic polynucleotide
  misc_feature: IgG1FcDELTA16_MS forward primer
atgagcgtcttcctcttccccccaaaaccc

SEQ ID NO: 296 - DNA, 30 bp, Artificial sequence
  Synthetic polynucleotide
  misc_feature: IgG1FcDELTA16_NS forward primer
aacagcgtcttcctcttccccccaaaaccc

SEQ ID NO: 297 - DNA, 30 bp, Artificial sequence
  Synthetic polynucleotide
  misc_feature: IgG1FcDELTA16_KS forward primer
aaaagcgtcttcctcttccccccaaaaccc

SEQ ID NO: 298 - DNA, 30 bp, Artificial sequence
  Synthetic polynucleotide
  misc_feature: IgG1FcDELTA16_VS forward primer
gtgagcgtcttcctcttccccccaaaaccc

SEQ ID NO: 299 - DNA, 30 bp, Artificial sequence
  Synthetic polynucleotide
  misc_feature: IgG1FcDELTA16_ES forward primer
gaaagcgtcttcctcttccccccaaaaccc

SEQ ID NO: 300 - DNA, 30 bp, Artificial sequence
  Synthetic polynucleotide
  misc_feature: IgG1FcDELTA16_DS
gatagcgtcttcctcttccccccaaaaccc

SEQ ID NO: 301 - DNA, 30 bp, Artificial sequence
  Synthetic polynucleotide
  misc_feature: IgG1FcDELTA16_CS forward primer
tgcagcgtcttcctcttccccccaaaaccc

SEQ ID NO: 302 - DNA, 30 bp, Artificial sequence
  Synthetic polynucleotide
  misc_feature: IgG1FcDELTA16_WS forward primer
tggagcgtcttcctcttccccccaaaaccc

SEQ ID NO: 303 - DNA, 30 bp, Artificial sequence
  Synthetic polynucleotide
  misc_feature: IgG1FcDELTA16_PS forward primer
ccgagcgtcttcctcttccccccaaaaccc

SEQ ID NO: 304 - DNA, 30 bp, Artificial sequence
  Synthetic polynucleotide
  misc_feature: IgG1FcDELTA16_RS forward primer
cgtagcgtcttcctcttccccccaaaaccc

SEQ ID NO: 305 - DNA, 30 bp, Artificial sequence
  Synthetic polynucleotide
  misc_feature: IgG1FcDELTA16_TS forward primer
accagcgtcttcctcttccccccaaaaccc

SEQ ID NO: 306 - DNA, 30 bp, Artificial sequence
  Synthetic polynucleotide
  misc_feature: IgG1FcDELTA16_AS forward primer
gcgagcgtcttcctcttccccccaaaaccc

SEQ ID NO: 307 - DNA, 30 bp, Artificial sequence
  Synthetic polynucleotide
  misc_feature: IgG1FcDELTA16_GS forward primer
ggcagcgtcttcctcttccccccaaaaccc

SEQ ID NO: 308 - DNA, 30 bp, Artificial sequence
  Synthetic polynucleotide
  misc_feature: IgG1FcDELTA16_xx  forward primer
  misc_feature (1)..(2): N is any nucleotide
  misc_feature (3)..(3): K is G or T
  misc_feature (4)..(5): N is any nucleotide
  misc_feature (6)..(6): K is G or T
nnknnkgtcttcctcttccccccaaaaccc

SEQ ID NO: 309 - DNA, 33 bp, Artificial sequence
  Synthetic polynucleotide
  misc_feature: IgG1FcDELTA16_xxX forward primer
  misc_feature (1)..(2): N is any nucleotide
  misc_feature (3)..(3): K is G or T
  misc_feature (4)..(5): N is any nucleotide
  misc_feature (6)..(6): K is G or T
  misc_feature (7)..(8): N is any nucleotide
  misc_feature (9)..(9): K is G or T
nnknnknnkgtcttcctcttccccccaaaaccc

SEQ ID NO: 310 - DNA, 45 bp, Artificial sequence
  Synthetic polynucleotide
  misc_feature: IgG1FcDELTA16_ELLGGPS forward primer
gaactcctgggaggaccgtcagtcttcctcttccccccaaaaccc

SEQ ID NO: 311 - DNA, 42 bp, Artificial sequence
  Synthetic polynucleotide
  misc_feature: IgG1FcDELTA16_LLGGPS forward primer
ctcctgggaggaccgtcagtcttcctcttccccccaaaaccc

SEQ ID NO: 312 - DNA, 39 bp, Artificial sequence
  Synthetic polynucleotide
  misc_feature: IgG1FcDELTA16_LGGPS forward primer
ctgggaggaccgtcagtcttcctcttccccccaaaaccc

SEQ ID NO: 313 - DNA, 36 bp, Artificial sequence
  Synthetic polynucleotide
  misc_feature: IgG1FcDELTA16_GGPS forward primer
ggaggaccgtcagtcttcctcttccccccaaaaccc

SEQ ID NO: 314 - DNA, 33 bp, Artificial sequence
  Synthetic polynucleotide
  misc_feature: IgG1FcDELTA16_GPS forward primer
ggaccgtcagtcttcctcttccccccaaaaccc

SEQ ID NO: 315 - DNA, 33 bp, Artificial sequence
  Synthetic polynucleotide
  misc_feature: IgG1FcDELTA16_SDW forward primer
tcagattgggtcttcctcttccccccaaaaccc

SEQ ID NO: 316 - DNA, 33 bp, Artificial sequence
  Synthetic polynucleotide
  misc_feature: IgG1FcDELTA16_FDW forward primer
tttgattgggtcttcctcttccccccaaaaccc

SEQ ID NO: 317 - DNA, 33 bp, Artificial sequence
  Synthetic polynucleotide
  misc_feature: IgG1FcDELTA16_YDW forward primer
tatgattgggtcttcctcttccccccaaaaccc

SEQ ID NO: 318 - DNA, 33 bp, Artificial sequence
  Synthetic polynucleotide
  misc_feature: IgG1FcDELTA16_LDW forward primer
ctggattgggtcttcctcttccccccaaaaccc

SEQ ID NO: 319 - DNA, 33 bp, Artificial sequence
  Synthetic polynucleotide
  misc_feature: IgG1FcDELTA16_HDW forward primer
catgattgggtcttcctcttccccccaaaaccc

SEQ ID NO: 320 - DNA, 33 bp, Artificial sequence
  Synthetic polynucleotide
  misc_feature: IgG1FcDELTA16_QDW forward primer
caggattgggtcttcctcttccccccaaaaccc

SEQ ID NO: 321 - DNA, 33 bp, Artificial sequence
  Synthetic polynucleotide
  misc_feature: IgG1FcDELTA16_IDW forward primer
attgattgggtcttcctcttccccccaaaaccc

SEQ ID NO: 322 - DNA, 33 bp, Artificial sequence
  Synthetic polynucleotide
  misc_feature: IgG1FcDELTA16_MDW forward primer
atggattgggtcttcctcttccccccaaaaccc

SEQ ID NO: 323 - DNA, 33 bp, Artificial sequence
  Synthetic polynucleotide
  misc_feature: IgG1FcDELTA16_NDW forward primer
aacgattgggtcttcctcttccccccaaaaccc

SEQ ID NO: 324 - DNA, 33 bp, Artificial sequence
  Synthetic polynucleotide
  misc_feature: IgG1FcDELTA16_KDW forward primer
aaagattgggtcttcctcttccccccaaaaccc

SEQ ID NO: 325 - DNA, 33 bp, Artificial sequence
  Synthetic polynucleotide
  misc_feature: IgG1FcDELTA16_VDW forward primer
gtggattgggtcttcctcttccccccaaaaccc

SEQ ID NO: 326 - DNA, 33 bp, Artificial sequence
  Synthetic polynucleotide
  misc_feature: IgG1FcDELTA16_EDW forward primer
gaagattgggtcttcctcttccccccaaaaccc

SEQ ID NO: 327 - DNA, 33 bp, Artificial sequence
  Synthetic polynucleotide
  misc_feature: IgG1FcDELTA16_DDW forward primer
gatgattgggtcttcctcttccccccaaaaccc

SEQ ID NO: 328 - DNA, 33 bp, Artificial sequence
  Synthetic polynucleotide
  misc_feature: IgG1FcDELTA16_CDW forward primer
tgcgattgggtcttcctcttccccccaaaaccc

SEQ ID NO: 329 - DNA, 33 bp, Artificial sequence
  Synthetic polynucleotide
  misc_feature: IgG1FcDELTA16_WDW forward primer
tgggattgggtcttcctcttccccccaaaaccc

SEQ ID NO: 330 - DNA, 33 bp, Artificial sequence
  Synthetic polynucleotide
  misc_feature: IgG1FcDELTA16_PDW forward primer
ccggattgggtcttcctcttccccccaaaaccc

SEQ ID NO: 331 - DNA, 33 bp, Artificial sequence
  Synthetic polynucleotide
  misc_feature: IgG1FcDELTA16_RDW forward primer
cgtgattgggtcttcctcttccccccaaaaccc

SEQ ID NO: 332 - DNA, 33 bp, Artificial sequence
  Synthetic polynucleotide
  misc_feature: IgG1FcDELTA16_TDW forward primer
accgattgggtcttcctcttccccccaaaaccc

SEQ ID NO: 333 - DNA, 33 bp, Artificial sequence
  Synthetic polynucleotide
  misc_feature: IgG1FcDELTA16_ADW forward primer
gcggattgggtcttcctcttccccccaaaaccc

SEQ ID NO: 334 - DNA, 33 bp, Artificial sequence
  Synthetic polynucleotide
  misc_feature: IgG1FcDELTA16_GDW forward primer
ggcgattgggtcttcctcttccccccaaaaccc

SEQ ID NO: 335 - DNA, 39 bp, Artificial sequence
  Synthetic polynucleotide
  misc_feature: IgG1FcDELTA16_SCWDW forward primer
tcatgttgggattgggtcttcctcttccccccaaaaccc

SEQ ID NO: 336 - DNA, 39 bp, Artificial sequence
  Synthetic polynucleotide
  misc_feature: IgG1FcDELTA16_FCWDW forward primer
ttttgttgggattgggtcttcctcttccccccaaaaccc

SEQ ID NO: 337 - DNA, 39 bp, Artificial sequence
  Synthetic polynucleotide
  misc_feature: IgG1FcDELTA16_YCWDW forward primer
tattgttgggattgggtcttcctcttccccccaaaaccc

SEQ ID NO: 338 - DNA, 39 bp, Artificial sequence
  Synthetic polynucleotide
  misc_feature: IgG1FcDELTA16_LCWDW forward primer
ctgtgttgggattgggtcttcctcttccccccaaaaccc

SEQ ID NO: 339 - DNA, 39 bp, Artificial sequence
  Synthetic polynucleotide
  misc_feature: IgG1FcDELTA16_HCWDW forward primer
cattgttgggattgggtcttcctcttccccccaaaaccc

SEQ ID NO: 340 - DNA, 39 bp, Artificial sequence
  Synthetic polynucleotide
  misc_feature: IgG1FcDELTA16_QCWDW forward primer
cagtgttgggattgggtcttcctcttccccccaaaaccc

SEQ ID NO: 341 - DNA, 39 bp, Artificial sequence
  Synthetic polynucleotide
  misc_feature: IgG1FcDELTA16_ICWDW forward primer
atttgttgggattgggtcttcctcttccccccaaaaccc

SEQ ID NO: 342 - DNA, 39 bp, Artificial sequence
  Synthetic polynucleotide
  misc_feature: IgG1FcDELTA16_MCWDW forward primer
atgtgttgggattgggtcttcctcttccccccaaaaccc

SEQ ID NO: 343 - DNA, 39 bp, Artificial sequence
  Synthetic polynucleotide
  misc_feature: IgG1FcDELTA16_NCWDW forward primer
aactgttgggattgggtcttcctcttccccccaaaaccc

SEQ ID NO: 344 - DNA, 39 bp, Artificial sequence
  Synthetic polynucleotide
  misc_feature: IgG1FcDELTA16_KCWDW forward primer
aaatgttgggattgggtcttcctcttccccccaaaaccc

SEQ ID NO: 345 - DNA, 39 bp, Artificial sequence
  Synthetic polynucleotide
  misc_feature: IgG1FcDELTA16_VCWDW forward primer
gtgtgttgggattgggtcttcctcttccccccaaaaccc

SEQ ID NO: 346 - DNA, 39 bp, Artificial sequence
  Synthetic polynucleotide
  misc_feature: IgG1FcDELTA16_ECWDW forward primer
gaatgttgggattgggtcttcctcttccccccaaaaccc

SEQ ID NO: 347 - DNA, 39 bp, Artificial sequence
  Synthetic polynucleotide
  misc_feature: IgG1FcDELTA16_DCWDW forward primer
gattgttgggattgggtcttcctcttccccccaaaaccc

SEQ ID NO: 348 - DNA, 39 bp, Artificial sequence
  Synthetic polynucleotide
  misc_feature: IgG1FcDELTA16_CCWDW forward primer
tgctgttgggattgggtcttcctcttccccccaaaaccc

SEQ ID NO: 349 - DNA, 39 bp, Artificial sequence
  Synthetic polynucleotide
  misc_feature: IgG1FcDELTA16_WCWDW forward primer
tggtgttgggattgggtcttcctcttccccccaaaaccc

SEQ ID NO: 350 - DNA, 39 bp, Artificial sequence
  Synthetic polynucleotide
  misc_feature: IgG1FcDELTA16_PCWDW forward primer
ccgtgttgggattgggtcttcctcttccccccaaaaccc

SEQ ID NO: 351 - DNA, 39 bp, Artificial sequence
  Synthetic polynucleotide
  misc_feature: IgG1FcDELTA16_RCWDW forward primer
cgttgttgggattgggtcttcctcttccccccaaaaccc

SEQ ID NO: 352 - DNA, 39 bp, Artificial sequence
  Synthetic polynucleotide
  misc_feature: IgG1FcDELTA16_TCWDW forward primer
acctgttgggattgggtcttcctcttccccccaaaaccc

SEQ ID NO: 353 - DNA, 39 bp, Artificial sequence
  Synthetic polynucleotide
  misc_feature: IgG1FcDELTA16_ACWDW forward primer
gcgtgttgggattgggtcttcctcttccccccaaaaccc

SEQ ID NO: 354 - DNA, 39 bp, Artificial sequence
  Synthetic polynucleotide
  misc_feature: IgG1FcDELTA16_GCWDW forward primer
ggctgttgggattgggtcttcctcttccccccaaaaccc

SEQ ID NO: 355 - DNA, 42 bp, Artificial sequence
  Synthetic polynucleotide
  misc_feature: IgG1FcDELTA16_XXCWDW forward primer
  misc_feature (1)..(2): N is any nucleotide
  misc_feature (3)..(3): K is G or T
  misc_feature (4)..(5): N is any nucleotide
  misc_feature (6)..(6): K is G or T
nnknnktgttgggattgggtcttcctcttccccccaaaaccc

SEQ ID NO: 356 - DNA, 21 bp, Artificial sequence
  Synthetic polynucleotide
  misc_feature: IgG1FcDELTA16 common forward primer
gtcttcctcttccccccaaaa

SEQ ID NO: 357 - DNA, 25 bp, Artificial sequence
  Synthetic polynucleotide
  misc_feature: IgG1FcDELTA16_SD reverse primer
atcgctgggccgagcggcgtggagc

SEQ ID NO: 358 - DNA, 25 bp, Artificial sequence
  Synthetic polynucleotide
  misc_feature: IgG1FcDELTA16_FD reverse primer
atcaaagggccgagcggcgtggagc

SEQ ID NO: 359 - DNA, 25 bp, Artificial sequence
  Synthetic polynucleotide
  misc_feature: IgG1FcDELTA16_YD reverse primer
atcatagggccgagcggcgtggagc

SEQ ID NO: 360 - DNA, 25 bp, Artificial sequence
  Synthetic polynucleotide
  misc_feature: IgG1FcDELTA16_LD reverse primer
atccaggggccgagcggcgtggagc

SEQ ID NO: 361 - DNA, 25 bp, Artificial sequence
  Synthetic polynucleotide
  misc_feature: IgG1FcDELTA16_HD reverse primer
atcatggggccgagcggcgtggagc

SEQ ID NO: 362 - DNA, 25 bp, Artificial sequence
  Synthetic polynucleotide
  misc_feature: IgG1FcDELTA16_QD reverse primer
atcctggggccgagcggcgtggagc

SEQ ID NO: 363 - DNA, 25 bp, Artificial sequence
  Synthetic polynucleotide
  misc_feature: IgG1FcDELTA16_ID reverse primer
atcaatgggccgagcggcgtggagc

SEQ ID NO: 364 - DNA, 25 bp, Artificial sequence
  Synthetic polynucleotide
  misc_feature: IgG1FcDELTA16_MD reverse primer
atccatgggccgagcggcgtggagc

SEQ ID NO: 365 - DNA, 25 bp, Artificial sequence
  Synthetic polynucleotide
  misc_feature: IgG1FcDELTA16_ND reverse primer
atcgttgggccgagcggcgtggagc

SEQ ID NO: 366 - DNA, 25 bp, Artificial sequence
  Synthetic polynucleotide
  misc_feature: IgG1FcDELTA16_KD reverse primer
atctttgggccgagcggcgtggagc

SEQ ID NO: 367 - DNA, 25 bp, Artificial sequence
  Synthetic polynucleotide
  misc_feature: IgG1FcDELTA16_VD reverse primer
atccacgggccgagcggcgtggagc

SEQ ID NO: 368 - DNA, 25 bp, Artificial sequence
  Synthetic polynucleotide
  misc_feature: IgG1FcDELTA16_ED reverse primer
atcttcgggccgagcggcgtggagc

SEQ ID NO: 369 - DNA, 25 bp, Artificial sequence
  Synthetic polynucleotide
  misc_feature: IgG1FcDELTA16_DD reverse primer
atcatcgggccgagcggcgtggagc

SEQ ID NO: 370 - DNA, 25 bp, Artificial sequence
  Synthetic polynucleotide
  misc_feature: IgG1FcDELTA16_CD reverse primer
atcgcagggccgagcggcgtggagc

SEQ ID NO: 371 - DNA, 25 bp, Artificial sequence
  Synthetic polynucleotide
  misc_feature: IgG1FcDELTA16_WD reverse primer
atcccagggccgagcggcgtggagc

SEQ ID NO: 372 - DNA, 25 bp, Artificial sequence
  Synthetic polynucleotide
  misc_feature: IgG1FcDELTA16_PD reverse primer
atccgggggccgagcggcgtggagc

SEQ ID NO: 373 - DNA, 25 bp, Artificial sequence
  Synthetic polynucleotide
  misc_feature: IgG1FcDELTA16_RD reverse primer
atcacggggccgagcggcgtggagc

SEQ ID NO: 374 - DNA, 25 bp, Artificial sequence
  Synthetic polynucleotide
  misc_feature: IgG1FcDELTA16_TD reverse primer
atcggtgggccgagcggcgtggagc

SEQ ID NO: 375 - DNA, 25 bp, Artificial sequence
  Synthetic polynucleotide
  misc_feature: IgG1FcDELTA16_AD reverse primer
atccgcgggccgagcggcgtggagc

SEQ ID NO: 376 - DNA, 25 bp, Artificial sequence
  Synthetic polynucleotide
  misc_feature: IgG1FcDELTA16_GD reverse primer
atcgccgggccgagcggcgtggagc

SEQ ID NO: 377 - DNA, 25 bp, Artificial sequence
  Synthetic polynucleotide
  misc_feature: IgG1FcDELTA16_SW reverse primer
ccagctgggccgagcggcgtggagc

SEQ ID NO: 378 - DNA, 25 bp, Artificial sequence
  Synthetic polynucleotide
  misc_feature: IgG1FcDELTA16_FW reverse primer
ccaaaagggccgagcggcgtggagc

SEQ ID NO: 379 - DNA, 25 bp, Artificial sequence
  Synthetic polynucleotide
  misc_feature: IgG1FcDELTA16_YW reverse primer
ccaatagggccgagcggcgtggagc

SEQ ID NO: 380 - DNA, 25 bp, Artificial sequence
  Synthetic polynucleotide
  misc_feature: IgG1FcDELTA16_LW reverse primer
ccacaggggccgagcggcgtggagc

SEQ ID NO: 381 - DNA, 25 bp, Artificial sequence
  Synthetic polynucleotide
  misc_feature: IgG1FcDELTA16_HW reverse primer
ccaatggggccgagcggcgtggagc

SEQ ID NO: 382 - DNA, 25 bp, Artificial sequence
  Synthetic polynucleotide
  misc_feature: IgG1FcDELTA16_QW reverse primer
ccactggggccgagcggcgtggagc

SEQ ID NO: 383 - DNA, 25 bp, Artificial sequence
  Synthetic polynucleotide
  misc_feature: IgG1FcDELTA16_IW reverse primer
ccaaatgggccgagcggcgtggagc

SEQ ID NO: 384 - DNA, 25 bp, Artificial sequence
  Synthetic polynucleotide
  misc_feature: IgG1FcDELTA16_MW reverse primer
ccacatgggccgagcggcgtggagc

SEQ ID NO: 385 - DNA, 25 bp, Artificial sequence
  Synthetic polynucleotide
  misc_feature: IgG1FcDELTA16_NW reverse primer
ccagttgggccgagcggcgtggagc

SEQ ID NO: 386 - DNA, 25 bp, Artificial sequence
  Synthetic polynucleotide
  misc_feature: IgG1FcDELTA16_KW reverse primer
ccatttgggccgagcggcgtggagc

SEQ ID NO: 387 - DNA, 25 bp, Artificial sequence
  Synthetic polynucleotide
  misc_feature: IgG1FcDELTA16_VW reverse primer
ccacacgggccgagcggcgtggagc

SEQ ID NO: 388 - DNA, 25 bp, Artificial sequence
  Synthetic polynucleotide
  misc_feature: IgG1FcDELTA16_EW reverse primer
ccattcgggccgagcggcgtggagc

SEQ ID NO: 389 - DNA, 25 bp, Artificial sequence
  Synthetic polynucleotide
  misc_feature: IgG1FcDELTA16_DW reverse primer
ccaatcgggccgagcggcgtggagc

SEQ ID NO: 390 - DNA, 25 bp, Artificial sequence
  Synthetic polynucleotide
  misc_feature: IgG1FcDELTA16_CW reverse primer
ccagcagggccgagcggcgtggagc

SEQ ID NO: 391 - DNA, 25 bp, Artificial sequence
  Synthetic polynucleotide
  misc_feature: IgG1FcDELTA16_WW reverse primer
ccaccagggccgagcggcgtggagc

SEQ ID NO: 392 - DNA, 25 bp, Artificial sequence
  Synthetic polynucleotide
  misc_feature: IgG1FcDELTA16_PW reverse primer
ccacgggggccgagcggcgtggagc

SEQ ID NO: 393 - DNA, 25 bp, Artificial sequence
  Synthetic polynucleotide
  misc_feature: IgG1FcDELTA16_RW reverse primer
ccaacggggccgagcggcgtggagc

SEQ ID NO: 394 - DNA, 25 bp, Artificial sequence
  Synthetic polynucleotide
  misc_feature: IgG1FcDELTA16_TW reverse primer
ccaggtgggccgagcggcgtggagc

SEQ ID NO: 395 - DNA, 25 bp, Artificial sequence
  Synthetic polynucleotide
  misc_feature: IgG1FcDELTA16_AW reverse primer
ccacgcgggccgagcggcgtggagc

SEQ ID NO: 396 - DNA, 25 bp, Artificial sequence
  Synthetic polynucleotide
  misc_feature: IgG1FcDELTA16_GW reverse primer
ccagccgggccgagcggcgtggagc

SEQ ID NO: 397 - DNA, 25 bp, Artificial sequence
  Synthetic polynucleotide
  misc_feature: IgG1FcDELTA16_SE reverse primer
ttcgctgggccgagcggcgtggagc

SEQ ID NO: 398 - DNA, 25 bp, Artificial sequence
  Synthetic polynucleotide
  misc_feature: IgG1FcDELTA16_FE reverse primer
ttcaaagggccgagcggcgtggagc

SEQ ID NO: 399 - DNA, 25 bp, Artificial sequence
  Synthetic polynucleotide
  misc_feature: IgG1FcDELTA16_YE reverse primer
ttcatagggccgagcggcgtggagc

SEQ ID NO: 400 - DNA, 25 bp, Artificial sequence
  Synthetic polynucleotide
  misc_feature: IgG1FcDELTA16_LE reverse primer
ttccaggggccgagcggcgtggagc

SEQ ID NO: 401 - DNA, 25 bp, Artificial sequence
  Synthetic polynucleotide
  misc_feature: IgG1FcDELTA16_HE reverse primer
ttcatggggccgagcggcgtggagc

SEQ ID NO: 402 - DNA, 25 bp, Artificial sequence
  Synthetic polynucleotide
  misc_feature: IgG1FcDELTA16_QE reverse primer
ttcctggggccgagcggcgtggagc

SEQ ID NO: 403 - DNA, 25 bp, Artificial sequence
  Synthetic polynucleotide
  misc_feature: IgG1FcDELTA16_IE reverse primer
ttcaatgggccgagcggcgtggagc

SEQ ID NO: 404 - DNA, 25 bp, Artificial sequence
  Synthetic polynucleotide
  misc_feature: IgG1FcDELTA16_ME reverse primer
ttccatgggccgagcggcgtggagc

SEQ ID NO: 405 - DNA, 25 bp, Artificial sequence
  Synthetic polynucleotide
  misc_feature: IgG1FcDELTA16_NE reverse primer
ttcgttgggccgagcggcgtggagc

SEQ ID NO: 406 - DNA, 25 bp, Artificial sequence
  Synthetic polynucleotide
  misc_feature: IgG1FcDELTA16_KE reverse primer
ttctttgggccgagcggcgtggagc

SEQ ID NO: 407 - DNA, 25 bp, Artificial sequence
  Synthetic polynucleotide
  misc_feature: IgG1FcDELTA16_VE reverse primer
ttccacgggccgagcggcgtggagc

SEQ ID NO: 408 - DNA, 25 bp, Artificial sequence
  Synthetic polynucleotide
  misc_feature: IgG1FcDELTA16_EE reverse primer
ttcttcgggccgagcggcgtggagc

SEQ ID NO: 409 - DNA, 25 bp, Artificial sequence
  Synthetic polynucleotide
  misc_feature: IgG1FcDELTA16_DE reverse primer
ttcatcgggccgagcggcgtggagc

SEQ ID NO: 410 - DNA, 25 bp, Artificial sequence
  Synthetic polynucleotide
  misc_feature: IgG1FcDELTA16_CE reverse primer
ttcgcagggccgagcggcgtggagc

SEQ ID NO: 411 - DNA, 25 bp, Artificial sequence
  Synthetic polynucleotide
  misc_feature: IgG1FcDELTA16_WE reverse primer
ttcccagggccgagcggcgtggagc

SEQ ID NO: 412 - DNA, 25 bp, Artificial sequence
  Synthetic polynucleotide
  misc_feature: IgG1FcDELTA16_PE reverse primer
ttccgggggccgagcggcgtggagc

SEQ ID NO: 413 - DNA, 25 bp, Artificial sequence
  Synthetic polynucleotide
  misc_feature: IgG1FcDELTA16_RE reverse primer
ttcacggggccgagcggcgtggagc

SEQ ID NO: 414 - DNA, 25 bp, Artificial sequence
  Synthetic polynucleotide
  misc_feature: IgG1FcDELTA16_TE reverse primer
ttcggtgggccgagcggcgtggagc

SEQ ID NO: 415 - DNA, 25 bp, Artificial sequence
  Synthetic polynucleotide
  misc_feature: IgG1FcDELTA16_AE reverse primer
ttccgcgggccgagcggcgtggagc

SEQ ID NO: 416 - DNA, 25 bp, Artificial sequence
  Synthetic polynucleotide
  misc_feature: IgG1FcDELTA16_GE reverse primer
ttcgccgggccgagcggcgtggagc

SEQ ID NO: 417 - DNA, 25 bp, Artificial sequence
  Synthetic polynucleotide
  misc_feature: IgG1FcDELTA16_SQ reverse primer
ctggctgggccgagcggcgtggagc

SEQ ID NO: 418 - DNA, 25 bp, Artificial sequence
  Synthetic polynucleotide
  misc_feature: IgG1FcDELTA16_FQ reverse primer
ctgaaagggccgagcggcgtggagc

SEQ ID NO: 419 - DNA, 25 bp, Artificial sequence
  Synthetic polynucleotide
  misc_feature: IgG1FcDELTA16_YQ reverse primer
ctgatagggccgagcggcgtggagc

SEQ ID NO: 420 - DNA, 25 bp, Artificial sequence
  Synthetic polynucleotide
  misc_feature: IgG1FcDELTA16_LQ reverse primer
ctgcaggggccgagcggcgtggagc

SEQ ID NO: 421 - DNA, 25 bp, Artificial sequence
  Synthetic polynucleotide
  misc_feature: IgG1FcDELTA16_HQ reverse primer
ctgatggggccgagcggcgtggagc

SEQ ID NO: 422 - DNA, 25 bp, Artificial sequence
  Synthetic polynucleotide
  misc_feature: IgG1FcDELTA16_QQ reverse primer
ctgctggggccgagcggcgtggagc

SEQ ID NO: 423 - DNA, 25 bp, Artificial sequence
  Synthetic polynucleotide
  misc_feature: IgG1FcDELTA16_IQ reverse primer
ctgaatgggccgagcggcgtggagc

SEQ ID NO: 424 - DNA, 25 bp, Artificial sequence
  Synthetic polynucleotide
  misc_feature: IgG1FcDELTA16_MQ reverse primer
ctgcatgggccgagcggcgtggagc

SEQ ID NO: 425 - DNA, 25 bp, Artificial sequence
  Synthetic polynucleotide
  misc_feature: IgG1FcDELTA16_NQ reverse primer
ctggttgggccgagcggcgtggagc

SEQ ID NO: 426 - DNA, 25 bp, Artificial sequence
  Synthetic polynucleotide
  misc_feature: IgG1FcDELTA16_KQ reverse primer
ctgtttgggccgagcggcgtggagc

SEQ ID NO: 427 - DNA, 25 bp, Artificial sequence
  Synthetic polynucleotide
  misc_feature: IgG1FcDELTA16_VQ reverse primer
ctgcacgggccgagcggcgtggagc

SEQ ID NO: 428 - DNA, 25 bp, Artificial sequence
  Synthetic polynucleotide
  misc_feature: IgG1FcDELTA16_EQ reverse primer
ctgctggggccgagcggcgtggagc

SEQ ID NO: 429 - DNA, 25 bp, Artificial sequence
  Synthetic polynucleotide
  misc_feature: IgG1FcDELTA16_DQ reverse primer
ctgatcgggccgagcggcgtggagc

SEQ ID NO: 430 - DNA, 25 bp, Artificial sequence
  Synthetic polynucleotide
  misc_feature: IgG1FcDELTA16_CQ reverse primer
ctggcagggccgagcggcgtggagc

SEQ ID NO: 431 - DNA, 25 bp, Artificial sequence
  Synthetic polynucleotide
  misc_feature: IgG1FcDELTA16_WQ reverse primer
ctgccagggccgagcggcgtggagc

SEQ ID NO: 432 - DNA, 25 bp, Artificial sequence
  Synthetic polynucleotide
  misc_feature: IgG1FcDELTA16_PQ reverse primer
ctgcgggggccgagcggcgtggagc

SEQ ID NO: 433 - DNA, 25 bp, Artificial sequence
  Synthetic polynucleotide
  misc_feature: IgG1FcDELTA16_RQ reverse primer
ctgacggggccgagcggcgtggagc

SEQ ID NO: 434 - DNA, 25 bp, Artificial sequence
  Synthetic polynucleotide
  misc_feature: IgG1FcDELTA16_TQ reverse primer
ctgggtgggccgagcggcgtggagc

SEQ ID NO: 435 - DNA, 25 bp, Artificial sequence
  Synthetic polynucleotide
  misc_feature: IgG1FcDELTA16_AQ reverse primer
ctgcgcgggccgagcggcgtggagc

SEQ ID NO: 436 - DNA, 25 bp, Artificial sequence
  Synthetic polynucleotide
  misc_feature: IgG1FcDELTA16_GQ reverse primer
ctggccgggccgagcggcgtggagc

SEQ ID NO: 437 - DNA, 20 bp, Artificial sequence
  Synthetic polynucleotide
  misc_feature: rituximab common reverse primer
aggtgctgggcacggtgggc

SEQ ID NO: 438 - DNA, 48 bp, Artificial sequence
  Synthetic polynucleotide
  misc_feature: Ritu-XXETCWDW forward primer
  misc_feature (1)..(2): N is any nucleotide
  misc_feature (3)..(3): K is G or T
  misc_feature (4)..(5): N is any nucleotide
  misc_feature (6)..(6): K is G or T
nnknnkgagacgtgttgggattgggtcttcctcttccccccaaaaccc

SEQ ID NO: 439 - DNA, 48 bp, Artificial sequence
  Synthetic polynucleotide
  misc_feature: Ritu-XXDDCWDW forward primer
  misc_feature (1)..(2): N is any nucleotide
  misc_feature (3)..(3): K is G or T
  misc_feature (4)..(5): N is any nucleotide
  misc_feature (6)..(6): K is G or T
nnknnkgatgattgttgggattgggtcttcctcttccccccaaaaccc

SEQ ID NO: 440 - DNA, 48 bp, Artificial sequence
  Synthetic polynucleotide
  misc_feature: Ritu-XXYDCWDW forward primer
  misc_feature (1)..(2): N is any nucleotide
  misc_feature (3)..(3): K is G or T
  misc_feature (4)..(5): N is any nucleotide
  misc_feature (6)..(6): K is G or T
nnknnktatgattgttgggattgggtcttcctcttccccccaaaaccc

SEQ ID NO: 441 - DNA, 45 bp, Artificial sequence
  Synthetic polynucleotide
  misc_feature: Ritu-XETCWDW forward primer
  misc_feature (1)..(2): N is any nucleotide
  misc_feature (3)..(3): K is G or T
nnkgagacgtgttgggattgggtcttcctcttccccccaaaaccc

SEQ ID NO: 442 - DNA, 45 bp, Artificial sequence
  Synthetic polynucleotide
  misc_feature: Ritu-XDDCWDW forward primer
  misc_feature (1)..(2): N is any nucleotide
  misc_feature (3)..(3): K is G or T
nnkgatgattgttgggattgggtcttcctcttccccccaaaaccc

SEQ ID NO: 443 - DNA, 45 bp, Artificial sequence
  Synthetic polynucleotide
  misc_feature: Ritu-XYDCWDW forward primer
  misc_feature (1)..(2): N is any nucleotide
  misc_feature (3)..(3): K is G or T
nnktatgattgttgggattgggtcttcctcttccccccaaaaccc

SEQ ID NO: 444 - DNA, 30 bp, Artificial sequence
  Synthetic polynucleotide
  misc_feature: Ritu-FETCWDW forward primer
tttgagacgtgttgggattgggtcttcctc

SEQ ID NO: 445 - DNA, 30 bp, Artificial sequence
  Synthetic polynucleotide
  misc_feature: Ritu-YETCWDW forward primer
tatgagacgtgttgggattgggtcttcctc

SEQ ID NO: 446 - DNA, 30 bp, Artificial sequence
  Synthetic polynucleotide
  misc_feature: Ritu-LETCWDW forward primer
ctggagacgtgttgggattgggtcttcctc

SEQ ID NO: 447 - DNA, 30 bp, Artificial sequence
  Synthetic polynucleotide
  misc_feature: Ritu-HETCWDW forward primer
catgagacgtgttgggattgggtcttcctc

SEQ ID NO: 448 - DNA, 30 bp, Artificial sequence
  Synthetic polynucleotide
  misc_feature: Ritu-QETCWDW forward primer
caggagacgtgttgggattgggtcttcctc

SEQ ID NO: 449 - DNA, 30 bp, Artificial sequence
  Synthetic polynucleotide
  misc_feature: Ritu-IETCWDW forward primer
attgagacgtgttgggattgggtcttcctc

SEQ ID NO: 450 - DNA, 30 bp, Artificial sequence
  Synthetic polynucleotide
  misc_feature: Ritu-METCWDW forward primer
atggagacgtgttgggattgggtcttcctc

SEQ ID NO: 451 - DNA, 30 bp, Artificial sequence
  Synthetic polynucleotide
  misc_feature: Ritu-NETCWDW forward primer
aacgagacgtgttgggattgggtcttcctc

SEQ ID NO: 452 - DNA, 30 bp, Artificial sequence
  Synthetic polynucleotide
  misc_feature: Ritu-KETCWDW forward primer
aaagagacgtgttgggattgggtcttcctc

SEQ ID NO: 453 - DNA, 30 bp, Artificial sequence
  Synthetic polynucleotide
  misc_feature: Ritu-VETCWDW forward primer
gtggagacgtgttgggattgggtcttcctc

SEQ ID NO: 454 - DNA, 30 bp, Artificial sequence
  Synthetic polynucleotide
  misc_feature: Ritu-DETCWDW forward primer
gatgagacgtgttgggattgggtcttcctc

SEQ ID NO: 455 - DNA, 30 bp, Artificial sequence
  Synthetic polynucleotide
  misc_feature: Ritu-SETCWDW forward primer
agcgagacgtgttgggattgggtcttcctc

SEQ ID NO: 456 - DNA, 30 bp, Artificial sequence
  Synthetic polynucleotide
  misc_feature: Ritu-CETCWDW forward primer
tgcgagacgtgttgggattgggtcttcctc

SEQ ID NO: 457 - DNA, 30 bp, Artificial sequence
  Synthetic polynucleotide
  misc_feature: Ritu-WETCWDW forward primer
tgggagacgtgttgggattgggtcttcctc

SEQ ID NO: 458 - DNA, 30 bp, Artificial sequence
  Synthetic polynucleotide
  misc_feature: Ritu-PETCWDW forward primer
ccggagacgtgttgggattgggtcttcctc

SEQ ID NO: 459 - DNA, 30 bp, Artificial sequence
  Synthetic polynucleotide
  misc_feature: Ritu-RETCWDW forward primer
cgtgagacgtgttgggattgggtcttcctc

SEQ ID NO: 460 - DNA, 30 bp, Artificial sequence
  Synthetic polynucleotide
  misc_feature: Ritu-TETCWDW forward primer
accgagacgtgttgggattgggtcttcctc

SEQ ID NO: 461 - DNA, 30 bp, Artificial sequence
  Synthetic polynucleotide
  misc_feature: Ritu-AETCWDW forward primer
gcggagacgtgttgggattgggtcttcctc

SEQ ID NO: 462 - DNA, 30 bp, Artificial sequence
  Synthetic polynucleotide
  misc_feature: Ritu-GETCWDW forward primer
ggcgagacgtgttgggattgggtcttcctc

SEQ ID NO: 463 - DNA, 30 bp, Artificial sequence
  Synthetic polynucleotide
  misc_feature: Ritu-EFTCWDW forward primer
gaatttacgtgttgggattgggtcttcctc

SEQ ID NO: 464 - DNA, 30 bp, Artificial sequence
  Synthetic polynucleotide
  misc_feature: Ritu-EYTCWDW forward primer
gaatatacgtgttgggattgggtcttcctc

SEQ ID NO: 465 - DNA, 30 bp, Artificial sequence
  Synthetic polynucleotide
  misc_feature: Ritu-ELTCWDW forward primer
gaactgacgtgttgggattgggtcttcctc

SEQ ID NO: 466 - DNA, 30 bp, Artificial sequence
  Synthetic polynucleotide
  misc_feature: Ritu-EHTCWDW forward primer
gaacatacgtgttgggattgggtcttcctc

SEQ ID NO: 467 - DNA, 30 bp, Artificial sequence
  Synthetic polynucleotide
  misc_feature: Ritu-EQTCWDW forward primer
gaacagacgtgttgggattgggtcttcctc

SEQ ID NO: 468 - DNA, 30 bp, Artificial sequence
  Synthetic polynucleotide
  misc_feature: Ritu-EITCWDW forward primer
gaaattacgtgttgggattgggtcttcctc

SEQ ID NO: 469 - DNA, 30 bp, Artificial sequence
  Synthetic polynucleotide
  misc_feature: Ritu-EMTCWDW forward primer
gaaatgacgtgttgggattgggtcttcctc

SEQ ID NO: 470 - DNA, 30 bp, Artificial sequence
  Synthetic polynucleotide
  misc_feature: Ritu-ENTCWDW
gaaaacacgtgttgggattgggtcttcctc

SEQ ID NO: 471 - DNA, 30 bp, Artificial sequence
  Synthetic polynucleotide
  misc_feature: Ritu-EKTCWDW forward primer
gaaaaaacgtgttgggattgggtcttcctc

SEQ ID NO: 472 - DNA, 30 bp, Artificial sequence
  Synthetic polynucleotide
  misc_feature: Ritu-EVTCWDW forward primer
gaagtgacgtgttgggattgggtcttcctc

SEQ ID NO: 473 - DNA, 30 bp, Artificial sequence
  Synthetic polynucleotide
  misc_feature: Ritu-EDTCWDW
gaagatacgtgttgggattgggtcttcctc

SEQ ID NO: 474 - DNA, 30 bp, Artificial sequence
  Synthetic polynucleotide
  misc_feature: Ritu-ESTCWDW forward primer
gaaagcacgtgttgggattgggtcttcctc

SEQ ID NO: 475 - DNA, 30 bp, Artificial sequence
  Synthetic polynucleotide
  misc_feature: Ritu-ECTCWDW forward primer
gaatgcacgtgttgggattgggtcttcctc

SEQ ID NO: 476 - DNA, 30 bp, Artificial sequence
  Synthetic polynucleotide
  misc_feature: Ritu-EWTCWDW forward primer
gaatggacgtgttgggattgggtcttcctc

SEQ ID NO: 477 - DNA, 30 bp, Artificial sequence
  Synthetic polynucleotide
  misc_feature: Ritu-EPTCWDW forward primer
gaaccgacgtgttgggattgggtcttcctc

SEQ ID NO: 478 - DNA, 30 bp, Artificial sequence
  Synthetic polynucleotide
  misc_feature: Ritu-ERTCWDW forward primer
gaacgtacgtgttgggattgggtcttcctc

SEQ ID NO: 479 - DNA, 30 bp, Artificial sequence
  Synthetic polynucleotide
  misc_feature: Ritu-ETTCWDW forward primer
gaaaccacgtgttgggattgggtcttcctc

SEQ ID NO: 480 - DNA, 30 bp, Artificial sequence
  Synthetic polynucleotide
  misc_feature: Ritu-EATCWDW forward primer
gaagcgacgtgttgggattgggtcttcctc

SEQ ID NO: 481 - DNA, 30 bp, Artificial sequence
  Synthetic polynucleotide
  misc_feature: Ritu-EGTCWDW forward primer
gaaggcacgtgttgggattgggtcttcctc

SEQ ID NO: 482 - DNA, 30 bp, Artificial sequence
  Synthetic polynucleotide
  misc_feature: Ritu-EEFCWDW forward primer
gaagagttttgttgggattgggtcttcctc

SEQ ID NO: 483 - DNA, 30 bp, Artificial sequence
  Synthetic polynucleotide
  misc_feature: Ritu-EEYCWDW forward primer
gaagagtattgttgggattgggtcttcctc

SEQ ID NO: 484 - DNA, 30 bp, Artificial sequence
  Synthetic polynucleotide
  misc_feature: Ritu-EELCWDW forward primer
gaagagctgtgttgggattgggtcttcctc

SEQ ID NO: 485 - DNA, 30 bp, Artificial sequence
  Synthetic polynucleotide
  misc_feature: Ritu-EEHCWDW forward primer
gaagagcattgttgggattgggtcttcctc

SEQ ID NO: 486 - DNA, 30 bp, Artificial sequence
  Synthetic polynucleotide
  misc_feature: Ritu-EEQCWDW forward primer
gaagagcagtgttgggattgggtcttcctc

SEQ ID NO: 487 - DNA, 30 bp, Artificial sequence
  Synthetic polynucleotide
  misc_feature: Ritu-EEICWDW forward primer
gaagagatttgttgggattgggtcttcctc

SEQ ID NO: 488 - DNA, 30 bp, Artificial sequence
  Synthetic polynucleotide
  misc_feature: Ritu-EEMCWDW forward primer
gaagagatgtgttgggattgggtcttcctc

SEQ ID NO: 489 - DNA, 30 bp, Artificial sequence
  Synthetic polynucleotide
  misc_feature: Ritu-EENCWDW forward primer
gaagagaactgttgggattgggtcttcctc

SEQ ID NO: 490 - DNA, 30 bp, Artificial sequence
  Synthetic polynucleotide
  misc_feature: Ritu-EEKCWDW forward primer
gaagagaaatgttgggattgggtcttcctc

SEQ ID NO: 491 - DNA, 30 bp, Artificial sequence
  Synthetic polynucleotide
  misc_feature: Ritu-EEVCWDW forward primer
gaagaggtgtgttgggattgggtcttcctc

SEQ ID NO: 492 - DNA, 30 bp, Artificial sequence
  Synthetic polynucleotide
  misc_feature: Ritu-EEECWDW forward primer
gaagaggaatgttgggattgggtcttcctc

SEQ ID NO: 493 - DNA, 30 bp, Artificial sequence
  Synthetic polynucleotide
  misc_feature: Ritu-EEDCWDW forward primer
gaagaggattgttgggattgggtcttcctc

SEQ ID NO: 494 - DNA, 30 bp, Artificial sequence
  Synthetic polynucleotide
  misc_feature: Ritu-EESCWDW forward primer
gaagagagctgttgggattgggtcttcctc

SEQ ID NO: 495 - DNA, 30 bp, Artificial sequence
  Synthetic polynucleotide
  misc_feature: Ritu-EECCWDW forward primer
gaagagtgctgttgggattgggtcttcctc

SEQ ID NO: 496 - DNA, 30 bp, Artificial sequence
  Synthetic polynucleotide
  misc_feature: Ritu-EEWCWDW forward primer
gaagagtggtgttgggattgggtcttcctc

SEQ ID NO: 497 - DNA, 30 bp, Artificial sequence
  Synthetic polynucleotide
  misc_feature: Ritu-EEPCWDW forward primer
gaagagccgtgttgggattgggtcttcctc

SEQ ID NO: 498 - DNA, 30 bp, Artificial sequence
  Synthetic polynucleotide
  misc_feature: Ritu-EERCWDW forward primer
gaagagcgttgttgggattgggtcttcctc

SEQ ID NO: 499 - DNA, 30 bp, Artificial sequence
  Synthetic polynucleotide
  misc_feature: Ritu-EEACWDW forward primer
gaagaggcgtgttgggattgggtcttcctc

SEQ ID NO: 500 - DNA, 30 bp, Artificial sequence
  Synthetic polynucleotide
  misc_feature: Ritu-EEGCWDW forward primer
gaagagggctgttgggattgggtcttcctc

SEQ ID NO: 501 - DNA, 30 bp, Artificial sequence
  Synthetic polynucleotide
  misc_feature: Ritu-EETFWDW forward primer
gaagagacgttttgggattgggtcttcctc

SEQ ID NO: 502 - DNA, 30 bp, Artificial sequence
  Synthetic polynucleotide
  misc_feature: Ritu-EETYWDW forward primer
gaagagacgtattgggattgggtcttcctc

SEQ ID NO: 503 - DNA, 30 bp, Artificial sequence
  Synthetic polynucleotide
  misc_feature: Ritu-EETLWDW forward primer
gaagagacgctgtgggattgggtcttcctc

SEQ ID NO: 504 - DNA, 30 bp, Artificial sequence
  Synthetic polynucleotide
  misc_feature: Ritu-EETHWDW forward primer
gaagagacgcattgggattgggtcttcctc

SEQ ID NO: 505 - DNA, 30 bp, Artificial sequence
  Synthetic polynucleotide
  misc_feature: Ritu-EETQWDW forward primer
gaagagacgcagtgggattgggtcttcctc

SEQ ID NO: 506 - DNA, 30 bp, Artificial sequence
  Synthetic polynucleotide
  misc_feature: Ritu-EETIWDW forward primer
gaagagacgatttgggattgggtcttcctc

SEQ ID NO: 507 - DNA, 30 bp, Artificial sequence
  Synthetic polynucleotide
  misc_feature: Ritu-EETMWDW forward primer
gaagagacgatgtgggattgggtcttcctc

SEQ ID NO: 508 - DNA, 30 bp, Artificial sequence
  Synthetic polynucleotide
  misc_feature: Ritu-EETNWDW forward primer
gaagagacgaactgggattgggtcttcctc

SEQ ID NO: 509 - DNA, 30 bp, Artificial sequence
  Synthetic polynucleotide
  misc_feature: Ritu-EETKWDW forward primer
gaagagacgaaatgggattgggtcttcctc

SEQ ID NO: 510 - DNA, 30 bp, Artificial sequence
  Synthetic polynucleotide
  misc_feature: Ritu-EETVWDW forward primer
gaagagacggtgtgggattgggtcttcctc

SEQ ID NO: 511 - DNA, 30 bp, Artificial sequence
  Synthetic polynucleotide
  misc_feature: Ritu-EETEWDW forward primer
gaagagacggaatgggattgggtcttcctc

SEQ ID NO: 512 - DNA, 30 bp, Artificial sequence
  Synthetic polynucleotide
  misc_feature: Ritu-EETDWDW forward primer
gaagagacggattgggattgggtcttcctc

SEQ ID NO: 513 - DNA, 30 bp, Artificial sequence
  Synthetic polynucleotide
  misc_feature: Ritu-EETSWDW forward primer
gaagagacgagctgggattgggtcttcctc

SEQ ID NO: 514 - DNA, 30 bp, Artificial sequence
  Synthetic polynucleotide
  misc_feature: Ritu-EETWWDW forward primer
gaagagacgtggtgggattgggtcttcctc

SEQ ID NO: 515 - DNA, 30 bp, Artificial sequence
  Synthetic polynucleotide
  misc_feature: Ritu-EETPWDW forward primer
gaagagacgccgtgggattgggtcttcctc

SEQ ID NO: 516 - DNA, 30 bp, Artificial sequence
  Synthetic polynucleotide
  misc_feature: Ritu-EETRWDW forward primer
gaagagacgcgttgggattgggtcttcctc

SEQ ID NO: 517 - DNA, 30 bp, Artificial sequence
  Synthetic polynucleotide
  misc_feature: Ritu-EETTWDW forward primer
gaagagacgacctgggattgggtcttcctc

SEQ ID NO: 518 - DNA, 30 bp, Artificial sequence
  Synthetic polynucleotide
  misc_feature: Ritu-EETAWDW forward primer
gaagagacggcgtgggattgggtcttcctc

SEQ ID NO: 519 - DNA, 30 bp, Artificial sequence
  Synthetic polynucleotide
  misc_feature: Ritu-EETGWDW forward primer
gaagagacgggctgggattgggtcttcctc

SEQ ID NO: 520 - DNA, 35 bp, Artificial sequence
  Synthetic polynucleotide
  misc_feature: Ritu-EETCWDD forward primer
gaagagacgtgttgggatgatgtcttcctcttccc

SEQ ID NO: 521 - DNA, 30 bp, Artificial sequence
  Synthetic polynucleotide
  misc_feature: Ritu-EETQWDD forward primer
gaagagacgcagtgggatgatgtcttcctc

SEQ ID NO: 522 - DNA, 36 bp, Artificial sequence
  Synthetic polynucleotide
  misc_feature: IgG1FcDELTA16_xxxx forward primer
  misc_feature (1)..(2): N is any nucleotide
  misc_feature (3)..(3): K is G or T
  misc_feature (4)..(5): N is any nucleotide
  misc_feature (6)..(6): K is G or T
  misc_feature (7)..(8): N is any nucleotide
  misc_feature (9)..(9): K is G or T
  misc_feature (10)..(11): N is any nucleotide
  misc_feature (12)..(12): K is G or T
nnknnknnknnkgtcttcctcttccccccaaaaccc

SEQ ID NO: 523 - DNA, 39 bp, Artificial sequence
  Synthetic polynucleotide
  misc_feature: IgG1FcDELTA16_xxxxx forward primer
  misc_feature (1)..(2): N is any nucleotide
  misc_feature (3)..(3): K is G or T
  misc_feature (4)..(5): N is any nucleotide
  misc_feature (6)..(6): K is G or T
  misc_feature (7)..(8): N is any nucleotide
  misc_feature (9)..(9): K is G or T
  misc_feature (10)..(11): N is any nucleotide
  misc_feature (12)..(12): K is G or T
  misc_feature (13)..(14): N is any nucleotide
  misc_feature (15)..(15): K is G or T
nnknnknnknnknnkgtcttcctcttccccccaaaaccc

SEQ ID NO: 524 - DNA, 42 bp, Artificial sequence
  Synthetic polynucleotide
  misc_feature: IgG1FcDELTA16_xxxxxx forward primer
  misc_feature (1)..(2): N is any nucleotide
  misc_feature (3)..(3): K is G or T
  misc_feature (4)..(5): N is any nucleotide
  misc_feature (6)..(6): K is G or T
  misc_feature (7)..(8): N is any nucleotide
  misc_feature (9)..(9): K is G or T
  misc_feature (10)..(11): N is any nucleotide
  misc_feature (12)..(12): K is G or T
  misc_feature (13)..(14): N is any nucleotide
  misc_feature (15)..(15): K is G or T
  misc_feature (16)..(17): N is any nucleotide
  misc_feature (18)..(18): K is G or T
nnknnknnknnknnknnkgtcttcctcttccccccaaaaccc

SEQ ID NO: 525 - DNA, 45 bp, Artificial sequence
  Synthetic polynucleotide
  misc_feature: IgG1FcDELTA16_xxxxxxx forward primer
  misc_feature (1)..(2): N is any nucleotide
  misc_feature (3)..(3): K is G or T
  misc_feature (4)..(5): N is any nucleotide
  misc_feature (6)..(6): K is G or T
  misc_feature (7)..(8): N is any nucleotide
  misc_feature (9)..(9): K is G or T
  misc_feature (10)..(11): N is any nucleotide
  misc_feature (12)..(12): K is G or T
  misc_feature (13)..(14): N is any nucleotide
  misc_feature (15)..(15): K is G or T
  misc_feature (16)..(17): N is any nucleotide
  misc_feature (18)..(18): K is G or T
  misc_feature (19)..(20): N is any nucleotide
  misc_feature (21)..(21): K is G or T
nnknnknnknnknnknnknnkgtcttcctcttccccccaaaaccc

SEQ ID NO: 526 - DNA, 48 bp, Artificial sequence
  Synthetic polynucleotide
  misc_feature: IgG1FcDELTA16_xxxxxxxx forward primer
  misc_feature (1)..(2): N is any nucleotide
  misc_feature (3)..(3): K is G or T
  misc_feature (4)..(5): N is any nucleotide
  misc_feature (6)..(6): K is G or T
  misc_feature (7)..(8): N is any nucleotide
  misc_feature (9)..(9): K is G or T
  misc_feature (10)..(11): N is any nucleotide
  misc_feature (12)..(12): K is G or T
  misc_feature (13)..(14): N is any nucleotide
  misc_feature (15)..(15): K is G or T
  misc_feature (16)..(17): N is any nucleotide
  misc_feature (18)..(18): K is G or T
  misc_feature (19)..(20): N is any nucleotide
  misc_feature (21)..(21): K is G or T
  misc_feature (22)..(23): N is any nucleotide
  misc_feature (24)..(24): K is G or T
nnknnknnknnknnknnknnknnkgtcttcctcttccccccaaaaccc

SEQ ID NO: 527 - DNA, 51 bp, Artificial sequence
  Synthetic polynucleotide
  misc_feature: IgG1FcDELTA16_xxxxxxxxx forward primer
  misc_feature (1)..(2): N is any nucleotide
  misc_feature (3)..(3): K is G or T
  misc_feature (4)..(5): N is any nucleotide
  misc_feature (6)..(6): K is G or T
  misc_feature (7)..(8): N is any nucleotide
  misc_feature (9)..(9): K is G or T
  misc_feature (10)..(11): N is any nucleotide
  misc_feature (12)..(12): K is G or T
  misc_feature (13)..(14): N is any nucleotide
  misc_feature (15)..(15): K is G or T
  misc_feature (16)..(17): N is any nucleotide
  misc_feature (18)..(18): K is G or T
  misc_feature (19)..(20): N is any nucleotide
  misc_feature (21)..(21): K is G or T
  misc_feature (22)..(23): N is any nucleotide
  misc_feature (24)..(24): K is G or T
  misc_feature (25)..(26): N is any nucleotide
  misc_feature (27)..(27): K is G or T
nnknnknnknnknnknnknnknnknnkgtcttcctcttccccccaaaaccc

SEQ ID NO: 528 - DNA, 30 bp, Artificial sequence
  Synthetic polynucleotide
  misc_feature: IgG1FcDELTA16_xx forward primer
  misc_feature (1)..(2): N is any nucleotide
  misc_feature (3)..(3): S is G or C
  misc_feature (4)..(5): N is any nucleotide
  misc_feature (6)..(6): S is G or C
nnsnnsgtcttcctcttccccccaaaaccc

SEQ ID NO: 529 - DNA, 33 bp, Artificial sequence
  Synthetic polynucleotide
  misc_feature: IgG1FcDELTA16_xxx forward primer
  misc_feature (1)..(2): N is any nucleotide
  misc_feature (3)..(3): S is G or C
  misc_feature (4)..(5): N is any nucleotide
  misc_feature (6)..(6): S is G or C
  misc_feature (7)..(8): N is any nucleotide
  misc_feature (9)..(9): S is G or C
nnsnnsnnsgtcttcctcttccccccaaaaccc

SEQ ID NO: 530 - DNA, 36 bp, Artificial sequence
  Synthetic polynucleotide
  misc_feature: IgG1FcDELTA16_xxxx forward primer
  misc_feature (1)..(2): N is any nucleotide
  misc_feature (3)..(3): N is any nucleotide
  misc_feature (4)..(5): N is any nucleotide
  misc_feature (6)..(6): N is any nucleotide
  misc_feature (7)..(8): N is any nucleotide
  misc_feature (9)..(9): N is any nucleotide
  misc_feature (10)..(11): N is any nucleotide
  misc_feature (12)..(12): N is any nucleotide
nnsnnsnnsnnsgtcttcctcttccccccaaaaccc

SEQ ID NO: 531 - DNA, 39 bp, Artificial sequence
  Synthetic polynucleotide
  misc_feature: IgG1FcDELTA16_xxxxx forward primer
  misc_feature (1)..(2): N is any nucleotide
  misc_feature (3)..(3): S is G or C
  misc_feature (4)..(5): N is any nucleotide
  misc_feature (6)..(6): S is G or C
  misc_feature (7)..(8): N is any nucleotide
  misc_feature (9)..(9): S is G or C
  misc_feature (10)..(11): N is any nucleotide
  misc_feature (12)..(12): S is G or C
  misc_feature (13)..(14): N is any nucleotide
  misc_feature (15)..(15): S is G or C
nnsnnsnnsnnsnnsgtcttcctcttccccccaaaaccc

SEQ ID NO: 532 - DNA, 42 bp, Artificial sequence
  Synthetic polynucleotide
  misc_feature: IgG1FcDELTA16_xxxxxx forward primer
  misc_feature (1)..(2): N is any nucleotide
  misc_feature (3)..(3): S is G or C
  misc_feature (4)..(5): N is any nucleotide
  misc_feature (6)..(6): S is G or C
  misc_feature (7)..(8): N is any nucleotide
  misc_feature (9)..(9): S is G or C
  misc_feature (10)..(11): N is any nucleotide
  misc_feature (12)..(12): S is G or C
  misc_feature (13)..(14): N is any nucleotide
  misc_feature (15)..(15): S is G or C
  misc_feature (16)..(17): N is any nucleotide
  misc_feature (18)..(18): S is G or C
nnsnnsnnsnnsnnsnnsgtcttcctcttccccccaaaaccc

SEQ ID NO: 533 - DNA, 45 bp, Artificial sequence
  Synthetic polynucleotide
  misc_feature: IgG1FcDELTA16_xxxxxxx forward primer
  misc_feature (1)..(2): N is any nucleotide
  misc_feature (3)..(3): S is G or C
  misc_feature (4)..(5): N is any nucleotide
  misc_feature (6)..(6): S is G or C
  misc_feature (7)..(8): N is any nucleotide
  misc_feature (9)..(9): S is G or C
  misc_feature (10)..(11): N is any nucleotide
  misc_feature (12)..(12): S is G or C
  misc_feature (13)..(14): N is any nucleotide
  misc_feature (15)..(15): S is G or C
  misc_feature (16)..(17): N is any nucleotide
  misc_feature (18)..(18): S is G or C
  misc_feature (19)..(20): N is any nucleotide
  misc_feature (21)..(21): S is G or C
nnsnnsnnsnnsnnsnnsnnsgtcttcctcttccccccaaaaccc

SEQ ID NO: 534 - DNA, 48 bp, Artificial sequence
  Synthetic polynucleotide
  misc_feature: IgG1FcDELTA16_xxxxxxxx forward primer
  misc_feature (1)..(2): N is any nucleotide
  misc_feature (3)..(3): S is G or C
  misc_feature (4)..(5): N is any nucleotide
  misc_feature (6)..(6): S is G or C
  misc_feature (7)..(8): N is any nucleotide
  misc_feature (9)..(9): S is G or C
  misc_feature (10)..(11): N is any nucleotide
  misc_feature (12)..(12): S is G or C
  misc_feature (13)..(14): N is any nucleotide
  misc_feature (15)..(15): S is G or C
  misc_feature (16)..(17): N is any nucleotide
  misc_feature (18)..(18): S is G or C
  misc_feature (19)..(20): N is any nucleotide
  misc_feature (21)..(21): S is G or C
  misc_feature (22)..(23): N is any nucleotide
  misc_feature (24)..(24): S is G or C
nnsnnsnnsnnsnnsnnsnnsnnsgtcttcctcttccccccaaaaccc

SEQ ID NO: 535 - DNA, 51 bp, Artificial sequence
  Synthetic polynucleotide
  misc_feature: IgG1FcDELTA16_xxxxxxxxx forward primer
  misc_feature (1)..(2): N is any nucleotide
  misc_feature (3)..(3): S is G or C
  misc_feature (4)..(5): N is any nucleotide
  misc_feature (6)..(6): S is G or C
  misc_feature (7)..(8): N is any nucleotide
  misc_feature (9)..(9): S is G or C
  misc_feature (10)..(11): N is any nucleotide
  misc_feature (12)..(12): S is G or C
  misc_feature (13)..(14): N is any nucleotide
  misc_feature (15)..(15): S is G or C
  misc_feature (16)..(17): N is any nucleotide
  misc_feature (18)..(18): S is G or C
  misc_feature (19)..(20): N is any nucleotide
  misc_feature (21)..(21): S is G or C
  misc_feature (22)..(23): N is any nucleotide
  misc_feature (24)..(24): S is G or C
  misc_feature (25)..(26): N is any nucleotide
  misc_feature (27)..(27): S is G or C
nnsnnsnnsnnsnnsnnsnnsnnsnnsgtcttcctcttccccccaaaaccc

SEQ ID NO: 536 - DNA, 24 bp, Artificial sequence
  Synthetic polynucleotide
  misc_feature: IgG1FcDELTA16_xx forward primer
  misc_feature (1)..(1): (trimer phosphoroamidites)2
gtcttcctcttccccccaaaaccc

SEQ ID NO: 537 - DNA, 24 bp, Artificial sequence
  Synthetic polynucleotide
  misc_feature: IgG1FcDELTA16_xxx forward primer
  misc_feature (1)..(1): (trimer phosphoroamidites)3
gtcttcctcttccccccaaaaccc

SEQ ID NO: 538 - DNA, 24 bp, Artificial sequence
  Synthetic polynucleotide
  misc_feature: IgG1FcDELTA16_xxxx forward primer
  misc_feature (1)..(1): (trimer phosphoroamidites)4
gtcttcctcttccccccaaaaccc

SEQ ID NO: 539 - DNA, 24 bp, Artificial sequence
  Synthetic polynucleotide
  misc_feature: IgG1FcDELTA16_xxxxx forward primer
  misc_feature (1)..(1): (trimer phosphoroamidites)5
gtcttcctcttccccccaaaaccc

SEQ ID NO: 540 - DNA, 24 bp, Artificial sequence
  Synthetic polynucleotide
  misc_feature: IgG1FcDELTA16_xxxxxx forward primer
  misc_feature (1)..(1): (trimer phosphoroamidites)6
gtcttcctcttccccccaaaaccc

SEQ ID NO: 541 - DNA, 24 bp, Artificial sequence
  Synthetic polynucleotide
  misc_feature: IgG1FcDELTA16_xxxxxxx forward primer
  misc_feature (1)..(1): (trimer phosphoroamidites)7
gtcttcctcttccccccaaaaccc

SEQ ID NO: 542 - DNA, 24 bp, Artificial sequence
  Synthetic polynucleotide
  misc_feature: IgG1FcDELTA16_xxxxxxxx forward primer
  misc_feature (1)..(1): (trimer phosphoroamidites)8
gtcttcctcttccccccaaaaccc

SEQ ID NO: 543 - DNA, 24 bp, Artificial sequence
  Synthetic polynucleotide
  misc_feature: IgG1FcDELTA16_xxxxxxxxx forward primer
  misc_feature (1)..(1): (trimer phosphoroamidites)9
gtcttcctcttccccccaaaaccc

SEQ ID NO: 544 - protein, 7 aa, Artificial sequence
  Synthetic polypeptide
  misc_feature: wild type lower hinge amino acid sequence
ELLGGPS

SEQ ID NO: 545 - protein, 7 aa, Artificial sequence
  Synthetic polypeptide
  misc_feature: novel protease-resistant hinge sequence
EETCWDW

SEQ ID NO: 546 - protein, 7 aa, Artificial sequence
  Synthetic polypeptide
  misc_feature: novel protease-resistant hinge sequence
EDSCWDW

SEQ ID NO: 547 - protein, 7 aa, Artificial sequence
  Synthetic polypeptide
  misc_feature: novel protease-resistant hinge sequence
EETCWSW

SEQ ID NO: 548 - DNA, 21 bp, Artificial sequence
  Synthetic polynucleotide
  misc_feature: nucleic acid sequence that encodes wildtype CDR1
tataccttcacaaggtataat

SEQ ID NO: 549 - DNA, 21 bp, Artificial sequence
  Synthetic polynucleotide
  misc_feature: nucleic acid sequence that encodes wildtype CDR2
atttatccgggcaacggcgat

SEQ ID NO: 550 - DNA, 36 bp, Artificial sequence
  Synthetic polynucleotide
  misc_feature: nucleic acid sequence that encodes wildtype CDR3
cgcagcacctattatggcggcgattggtattttaac

SEQ ID NO: 551 - DNA, 21 bp, Artificial sequence
  Synthetic polynucleotide
  misc_feature: CDR1 clone P01A09
tataccgggaagcggtataac

SEQ ID NO: 552 - DNA, 21 bp, Artificial sequence
  Synthetic polynucleotide
  misc_feature: CDR1 clone P01B01
tatacctgttttaggtataac

SEQ ID NO: 553 - DNA, 21 bp, Artificial sequence
  Synthetic polynucleotide
  misc_feature: CDR1 clone P02C12
tataccttcacaattcgtttg

SEQ ID NO: 554 - DNA, 21 bp, Artificial sequence
  Synthetic polynucleotide
  misc_feature: CDR1 clone P02F01
tataccgggcgtttttataac

SEQ ID NO: 555 - DNA, 21 bp, Artificial sequence
  Synthetic polynucleotide
  misc_feature: CDR1 clone P03A05
tataccagttggatgtataac

SEQ ID NO: 556 - DNA, 21 bp, Artificial sequence
  Synthetic polynucleotide
  misc_feature: CDR1 clone P05B09
tggttgtggacaagctataac

SEQ ID NO: 557 - DNA, 21 bp, Artificial sequence
  Synthetic polynucleotide
  misc_feature: CDR1 clone P05H07
tatacctgggggatttataac

SEQ ID NO: 558 - DNA, 21 bp, Artificial sequence
  Synthetic polynucleotide
  misc_feature: CDR1 clone P04A02
tataccttcacaaggtataat

SEQ ID NO: 559 - DNA, 21 bp, Artificial sequence
  Synthetic polynucleotide
  misc_feature: CDR1 clone P05F06
tataccttcacatttccttat

SEQ ID NO: 560 - DNA, 21 bp, Artificial sequence
  Synthetic polynucleotide
  misc_feature: CDR1 clone P07C04
tataccggtattcggtataac

SEQ ID NO: 561 - DNA, 21 bp, Artificial sequence
  Synthetic polynucleotide
  misc_feature: CDR2 clone P04D06
atttatccgggcttgtatctt

SEQ ID NO: 562 - DNA, 21 bp, Artificial sequence
  Synthetic polynucleotide
  misc_feature: CDR2 clone P04F01
atttatccgggcacgctgctg

SEQ ID NO: 563 - DNA, 21 bp, Artificial sequence
  Synthetic polynucleotide
  misc_feature: CDR2 clone P04F02
atttatccgggccatatgggg

SEQ ID NO: 564 - DNA, 21 bp, Artificial sequence
  Synthetic polynucleotide
  misc_feature: CDR2 clone P04G03
atttatccgggcatgctttgg

SEQ ID NO: 565 - DNA, 21 bp, Artificial sequence
  Synthetic polynucleotide
  misc_feature: CDR2 clone P04H06
atttatccgggcgctgtttcg

SEQ ID NO: 566 - DNA, 21 bp, Artificial sequence
  Synthetic polynucleotide
  misc_feature: CDR2 clone P04H07
atttatccgggcactcataag

SEQ ID NO: 567 - DNA, 21 bp, Artificial sequence
  Synthetic polynucleotide
  misc_feature: CDR2 clone P06A06
atttatccgggcactcagtct

SEQ ID NO: 568 - DNA, 21 bp, Artificial sequence
  Synthetic polynucleotide
  misc_feature: CDR2 clone P06B11
atttatccgggcaatgcggat

SEQ ID NO: 569 - DNA, 21 bp, Artificial sequence
  Synthetic polynucleotide
  misc_feature: CDR2 clone P06H01
atttatccgggcagttttgag

SEQ ID NO: 570 - DNA, 21 bp, Artificial sequence
  Synthetic polynucleotide
  misc_feature: CDR2 clone P04D09
atttatccgggcacgtttctt

SEQ ID NO: 571 - DNA, 21 bp, Artificial sequence
  Synthetic polynucleotide
  misc_feature: CDR2 clone P05A03
atttatccggttacgggcgat

SEQ ID NO: 572 - DNA, 21 bp, Artificial sequence
  Synthetic polynucleotide
  misc_feature: CDR2 clone P05A12
atttatccgtatctgggcgat

SEQ ID NO: 573 - DNA, 21 bp, Artificial sequence
  Synthetic polynucleotide
  misc_feature: CDR2 clone P05B02
atttatccgtggaatggcgat

SEQ ID NO: 574 - DNA, 21 bp, Artificial sequence
  Synthetic polynucleotide
  misc_feature: CDR2 clone P06B04
atttatcctctgtggggcgat

SEQ ID NO: 575 - DNA, 21 bp, Artificial sequence
  Synthetic polynucleotide
  misc_feature: CDR2 clone P06B11
atttatccgggcagtagtcgt

SEQ ID NO: 576 - DNA, 21 bp, Artificial sequence
  Synthetic polynucleotide
  misc_feature: CDR2 clone P06H05
atttatccgggcacttttcgt

SEQ ID NO: 577 - DNA, 21 bp, Artificial sequence
  Synthetic polynucleotide
  misc_feature: CDR2 clone P06H11
atttatccgggcgttggtcgg

SEQ ID NO: 578 - DNA, 21 bp, Artificial sequence
  Synthetic polynucleotide
  misc_feature: CDR2 clone P07F02
atttatccgggctctgaggcg

SEQ ID NO: 579 - DNA, 21 bp, Artificial sequence
  Synthetic polynucleotide
  misc_feature: CDR2 clone P07F10
atttatccgggcagtaatatg

SEQ ID NO: 580 - DNA, 21 bp, Artificial sequence
  Synthetic polynucleotide
  misc_feature: CDR2 clone P08B05
atttatccgggcgcttttctt

SEQ ID NO: 581 - DNA, 36 bp, Artificial sequence
  Synthetic polynucleotide
  misc_feature: CDR3 clone P07C02
cagtctatttattatggcggcgattggtattttaac

SEQ ID NO: 582 - DNA, 36 bp, Artificial sequence
  Synthetic polynucleotide
  misc_feature: CDR3 clone P07H08
cgcagcacctattatggcggcgattggctgattgct

SEQ ID NO: 583 - DNA, 36 bp, Artificial sequence
  Synthetic polynucleotide
  misc_feature: CDR3 clone P07H10
cgcagcaccgtggcggggggcgattggtattttaac

SEQ ID NO: 584 - DNA, 36 bp, Artificial sequence
  Synthetic polynucleotide
  misc_feature: CDR3 clone P08A01
cgcagcacctattatggcggcgattggcggtggcgg

SEQ ID NO: 585 - DNA, 36 bp, Artificial sequence
  Synthetic polynucleotide
  misc_feature: CDR3 clone P08B11
cgcagcacctattatggcgggttttggtattttaac

SEQ ID NO: 586 - DNA, 36 bp, Artificial sequence
  Synthetic polynucleotide
  misc_feature: CDR3 clone P08G02
cgcagcacctattatggcggcgattggtcttgggct

SEQ ID NO: 587 - DNA, 36 bp, Artificial sequence
  Synthetic polynucleotide
  misc_feature: CDR3 clone P07A06
cgcagcaccatgtgtaagggcgattggtattttaac

SEQ ID NO: 588 - DNA, 36 bp, Artificial sequence
  Synthetic polynucleotide
  misc_feature: CDR3 clone P08E05
cgcagcaccatgttgggtggcgattggtattttaac

SEQ ID NO: 589 - protein, 7 aa, Artificial Sequence
  Synthetic polypeptide
  MISC_FEATURE: Rituximab heavy chain, CDR1, amino acid sequence
YTFTSYN

SEQ ID NO: 590 - protein, 7 aa, Artificial Sequence
  Synthetic polypeptide
  MISC_FEATURE: Rituximab heavy chain, CDR2, amino acid sequence
IYPGNGD

SEQ ID NO: 591 - protein, 12 aa, Artificial Sequence
  Synthetic polypeptide
  MISC_FEATURE: Rituximab heavy chain, CDR3, amino acid sequence
RSTYYGGDWYFN

SEQ ID NO: 592 - protein, 7 aa, Artificial Sequence
  Synthetic polypeptide
  MISC_FEATURE: heavy chain CDR1 clone A-P01A09
YTGKRYN

SEQ ID NO: 593 - protein, 7 aa, Artificial Sequence
  Synthetic polypeptide
  MISC_FEATURE: heavy chain CDR1 clone A-P01B01
YTCFRYN

SEQ ID NO: 594 - protein, 7 aa, Artificial Sequence
  Synthetic polypeptide
  MISC_FEATURE: heavy chain CDR1 clone A-P02C12
YTFTIRL

SEQ ID NO: 595 - protein, 7 aa, Artificial Sequence
  Synthetic polypeptide
  MISC_FEATURE: heavy chain CDR1 clone A-P02F01
YTGRFYN

SEQ ID NO: 596 - protein, 7 aa, Artificial Sequence
  Synthetic polypeptide
  MISC_FEATURE: heavy chain CDR1 clone A-P03A03
YTSWMYN

SEQ ID NO: 597 - protein, 7 aa, Artificial Sequence
  Synthetic polypeptide
  MISC_FEATURE: heavy chain CDR1 clone A-P05B09
WLWTSYN

SEQ ID NO: 598 - protein, 7 aa, Artificial Sequence
  Synthetic polypeptide
  MISC_FEATURE: heavy chain CDR1 clone A-P05H07
YTWGIYN

SEQ ID NO: 599 - protein, 7 aa, Artificial Sequence
  Synthetic polypeptide
  MISC_FEATURE: CDR1 clone B-P04A02
YTFTRYN

SEQ ID NO: 600 - protein, 7 aa, Artificial Sequence
  Synthetic polypeptide
  MISC_FEATURE: heavy chain CDR1 clone B-P05F06
YTFTFPY

SEQ ID NO: 601 - protein, 7 aa, Artificial Sequence
  Synthetic polypeptide
  MISC_FEATURE: heavy chain CDR1 clone B-P07C04
YTGIRYN

SEQ ID NO: 602 - protein, 7 aa, Artificial Sequence
  Synthetic polypeptide
  MISC_FEATURE: heavy chain CDR clone A-P04D06
IYPGLYL

SEQ ID NO: 603 - protein, 7 aa, Artificial Sequence
  Synthetic polypeptide
  MISC_FEATURE: heavy chain CDR2 clone A-P04F01
IYPGTLL

SEQ ID NO: 604 - protein, 7 aa, Artificial Sequence
  Synthetic polypeptide
  MISC_FEATURE: heavy chain CDR2 clone A-P04F02
IYPGHMG

SEQ ID NO: 605 - protein, 7 aa, Artificial Sequence
  Synthetic polypeptide
  MISC_FEATURE: heavy chain CDR2 clone A-P04G03
IYPGMLW

SEQ ID NO: 606 - protein, 7 aa, Artificial Sequence
  Synthetic polypeptide
  MISC_FEATURE: heavy chain CDR2 clone A-P04H06
IYPGAVS

SEQ ID NO: 607 - protein, 7 aa, Artificial Sequence
  Synthetic polypeptide
  MISC_FEATURE: heavy chain CDR2 clone A-P04H07
IYPGTHK

SEQ ID NO: 608 - protein, 7 aa, Artificial Sequence
  Synthetic polypeptide
  MISC_FEATURE: heavy chain CDR2 clone A-P06A06
IYPGTQS

SEQ ID NO: 609 - protein, 7 aa, Artificial Sequence
  Synthetic polypeptide
  MISC_FEATURE: heavy chain CDR2 clone A-P06B11
IYPGNAD

SEQ ID NO: 610 - protein, 7 aa, Artificial Sequence
  Synthetic polypeptide
  MISC_FEATURE: heavy chain CDR2 clone A-P06H01
IYPGSFE

SEQ ID NO: 611 - protein, 7 aa, Artificial Sequence
  Synthetic polypeptide
  MISC_FEATURE: heavy chain CDR2 clone B-P04D09
IYPGTFL

SEQ ID NO: 612 - protein, 7 aa, Artificial Sequence
  Synthetic polypeptide
  MISC_FEATURE: heavy chain CDR2 clone B-P05A03
IYPVTGD

SEQ ID NO: 613 - protein, 7 aa, Artificial Sequence
  Synthetic polypeptide
  MISC_FEATURE: heavy chain CDR2 clone B-P05A12
IYPYLGD

SEQ ID NO: 614 - protein, 7 aa, Artificial Sequence
  Synthetic polypeptide
  MISC_FEATURE: heavy chain CDR2 clone B-P05B02
IYPWNGD

SEQ ID NO: 615 - protein, 7 aa, Artificial Sequence
  Synthetic polypeptide
  MISC_FEATURE: heavy chain CDR2 clone B-P06B04
IYPLWGD

SEQ ID NO: 616 - protein, 7 aa, Artificial Sequence
  Synthetic polypeptide
  MISC_FEATURE: heavy chain CDR2 clone B-P06B11
IYPGSSR

SEQ ID NO: 617 - protein, 7 aa, Artificial Sequence
  Synthetic polypeptide
  MISC_FEATURE: heavy chain CDR2 clone B-P06H05
IYPGTFR

SEQ ID NO: 618 - protein, 7 aa, Artificial Sequence
  Synthetic polypeptide
  MISC_FEATURE: heavy chain CDR2 clone B-P06H11
IYPGVGR

SEQ ID NO: 619 - protein, 7 aa, Artificial Sequence
  Synthetic polypeptide
  MISC_FEATURE: heavy chain CDR2 clone B-P07F02
IYPGSEA

SEQ ID NO: 620 - protein, 7 aa, Artificial Sequence
  Synthetic polypeptide
  MISC_FEATURE: heavy chain CDR2 clone B-P07F10
IYPGSNM

SEQ ID NO: 621 - protein, 7 aa, Artificial Sequence
  Synthetic polypeptide
  MISC_FEATURE: heavy chain CDR2 clone B-P08B05
IYPGAFL

SEQ ID NO: 622 - protein, 12 aa, Artificial Sequence
  Synthetic polypeptide
  MISC_FEATURE: heavy chain CDR3 clone A-P07C02
QSIYYGGDWYFN

SEQ ID NO: 623 - protein, 12 aa, Artificial Sequence
  Synthetic polypeptide
  MISC_FEATURE: heavy chain CDR3 clone A-P07H08
RSTYYGGDWLIA

SEQ ID NO: 624 - protein, 12 aa, Artificial Sequence
  Synthetic polypeptide
  MISC_FEATURE: heavy chain CDR3 clone A-P07H10
RSTVAGGDWYFN

SEQ ID NO: 625 - protein, 12 aa, Artificial Sequence
  Synthetic polypeptide
  MISC_FEATURE: heavy chain CDR3 clone A-P08A01
RSTYYGGDWRWR

SEQ ID NO: 626 - protein, 12 aa, Artificial Sequence
  Synthetic polypeptide
  MISC_FEATURE: heavy chain CDR3 clone A-P08B11
RSTYYGGFWYFN

SEQ ID NO: 627 - protein, 12 aa, Artificial Sequence
  Synthetic polypeptide
  MISC_FEATURE: heavy chain CDR3 clone A-P08G02
RSTYYGGDWSWA

SEQ ID NO: 628 - protein, 12 aa, Artificial Sequence
  Synthetic polypeptide
  MISC_FEATURE: heavy chain CDR3 clone B-P07A06
RSTMCKGDWYFN

SEQ ID NO: 629 - protein, 12 aa, Artificial Sequence
  Synthetic polypeptide
  MISC_FEATURE: heavy chain CDR3 clone B-P08E05
RSTMLGGDWYFN

SEQ ID NO: 630 - DNA, 18 bp, Artificial Sequence
  Synthetic polynucleotide
  misc_feature: Rituximab light chain, CDR1, nucleic acid sequence
gcgagcagcagcgtgagc

SEQ ID NO: 631 - DNA, 15 bp, Artificial Sequence
  Synthetic polynucleotide
  misc_feature: Rituximab light chain, CDR2, nucleic acid sequence
ggaagcggcaccagc

SEQ ID NO: 632 - DNA, 18 bp, Artificial Sequence
  Synthetic polynucleotide
  misc_feature: Rituximab light chain, CDR3, nucleic acid sequence
tggaccagcaacccgccg

SEQ ID NO: 633 - protein, 6 aa, Artificial Sequence
  Synthetic polypeptide
  MISC_FEATURE: Rituximab light chain, CDR1, amino acid sequence
ASSSVS

SEQ ID NO: 634 - protein, 5 aa, Artificial Sequence
  Synthetic polypeptide
  MISC_FEATURE: Rituximab light chain, CDR2, amino acid sequence
GSGTS

SEQ ID NO: 635 - protein, 6 aa, Artificial Sequence
  Synthetic polypeptide
  MISC_FEATURE: Rituximab light chain, CDR3, amino acid sequence
WTSNPP
